United States Patent Application Publication US 2026/0058010 A1 - sequence listing, part 16

SEQ ID NO: 183 - DNA, 92301 bp, Homo sapiens
  source 1..92301: mol_type = genomic DNA
ttccagttactccggaggctgagccacaagaatcgcgggaagcggaggttgcagtgagtcgagatggggccacagcactccagcctgggcgacagagtgggactcagtctcaaaaaaaaaaaaaaagtatttcccaattcttcgtcagtttttgccctctccccacttcgccttctccaggctcctgaaaagtatctcccccaaccctttctgtgtacacggggaaaacacgtgttcatttttattatggcgctgaaacctacccttctcttcaaatcgcttctgtagatcgttctagtataaaatgtggcaagaggctaaagggagagatatagaccagttctttggccctcgctttccaacttcaagttacacctgtgaaactcatgggtccttccacagccttcaaaaactaagggcgtcccctgtcctctccccagatgtcccttccccatcgccggtagcgagtgggagacagctcagcgcggggcaggggagcactgggcccggagatggaaggcagcgtcaaaagcgccgctggaaaatccctgagcgctaaccgttgcctgtgtgagcccttaaatctacaaatttccaacacctgtagcctttgggtttcccaggacttccatcgaccctggcggcagagagggcaggcctgagatgcagtgacttgagggcacatggccaactcttgtcactccaagatcacactggggaaccagactgacttctccaattctgaactcgccccggcctcgggcggctcaaagggcctcctctgccgcatccccgccaaaaccaaaccgcctggcacaagccggtaagcaaccaccctgctgggagagggaaggaagagtaggcgcagccctagatcaatttccttgcactgcttctcccagacggtcaagtcagctgcgtcccaccgaaaagggcgcatcgcccacgcccgaaacgcagccgctgggggccgagaaattatccccacctggcccgagggccagggacgcaggagcgcagcagcgtggaggggctccgcgctggcccggcgctgcccgcggtcctgccctcgttccaagggcacggcgccggtacgaggacaccgacgctgtggcgcaactgccgtcccccgcagcaatcccggagcccggctcccggccgcccctcggccctgcgcaggctgcctctccccgacgcggagtcccaccccgctacccgccgcccagacgacctcataaacaagtcctcgaagtgcggaggcaggaggcggggcgcagcgcgggggcaggaggcgggccagggtcagggcagaggctgcggccgcgcgtccccattggccgggacgcagtgagccgcccggagctcggcgcgggcggggcctgccggcgcgtgcccgcccacacacccgcgccggtgcccgccccccgccctccgcgcccgccccgtgcccgccccaagccggccgacggagtttttaaagtgggctgccggccgcgggagctttacactcgcgagcggaccgccacacgggtccggtgcccgctgcgcttccgccccagcgctcctgaggcggccgtacaatcctcggcagtgtcctgagactgtatggtcagctcagcccggcctccgactccttccgactcccagcattcgagccacttttttttttctttgaaaactcagaaaagtgactccttttccagggaaaaaggaacttgggttcccttctctccgtcctcttttcgggtctgacagcctccacccactccttccccggaccccgcctccgcgcgcaggttcctcccagtcacctttctccacccccgcccccgcacctagcccgccgcgcgccaccttccacctgactgcgcggggcgctcgggacctgcgcgcacctcggaccttcaccacccgcccgggccgcggggagcggacgagggccacagccccccacccgccagggagcccaggtgctcggcgtctgaacgtctcaaagggccacagcgacaatgacagctgacaaggagaagaaaaggtaagcgggcgtccgggccgatcagggggccggtccgaggccagggccgggctgcgcggggcaggcgcgaccgagagtggttgggagaagagtgctgagaggtcttcggagctcgaggctcggtttggagggctgtgagggggagagcatgtgcccggtttgggggcgcggatcagcagctttgcagtggagacttctgcggctcggaggagtcggggatttgcgcgcacggcgaggccaggaggccgagggagatggcctggaggtcggaggtgcttccgcggtgcctttgaaaatctcccagccgccccgcagcagattaccgtggccaccggcgcttggaaatgtttgtgggtgcatgtcctcgactttctctggtctctcattttggggcagcatccacgtctctatttttctctggattcgcggagtccttccaaatgcgctcctgtgcccgcgccgcggcccaagtgggcaaaggggggcgggaggcggagagcggctcagggacacgatcctaccgaggagccaggacccttcagagcgccccgctgccgggctccagaccccaccgaaggttggagaacccacttcctcgtgccgcaccttgactctggggagagtaggtagtgagtgacctggattgccctgcgggggcagatggttcggtgtgtaggaagcggacggcaacactggatgtccctggcaggtccgggtgtctgtctccgaagaggacagagaagggcagccacgatctgcccgcctgccctcgcgagcctctcggcactgggtgagaggcaactctggccatttcttgctgccctctcgccctctcccggccgctcccagtccagccgggcccggcgctacccgagcgagggttcgagccctctgcgcggccgcgcagaagcaggcagggcctcaacttctgcaaatgtgtgcggctcgccgcctgtcccctttctcctcctgtctccacccgtgcggccccagtggcctggagcttccagccccgcgcttggccgcggcttggcgaggctatgctgcgggaagctggaatccaacgcgcggccggctgaaccgcctgagccgcgggaaaccagcggcggagcggcggtatagaggtgcgaggatgaggaggaccgactcgctaagggagggaggtgactggccgggagggctcactgccgaggttgatttgctcttgttccaacttccactacgggactggagccagaaaccgtgtatcctccggtcgaaagcagcggttcccacctcggggcaccgataaggatttgataaacgggagcgaatcgcgcctgtcctggctcggcgcccgggcccttcactgcgggatcgctaggggaggggattgggccctgctcccctttcctggccgtagtcccccctttctcgtcaccgtcgcgccctcagacccaagacaagtgagggagccctgagactgcagccggcacattcccagggccctcggagcagtcctggggttccatgtcttttgaaggcagcagagcaaggaaaagactcttaagattccagtgcgttttgtaaaaaccaatcataatgctaataatgactgaaccatcgaaaagcaaagttatagacagcgcctgcagacgctttcgggtccggagccggggagggaacttgtgtattttacaactgcgatgcctatcgggaatgtggcaatcgccgaggtggggcctgacagtaatcttgacaaatgtgtgaagtgtcagctcctcctgcgctccttagcgccgggttttgtgcagttttgtaccgtatataccgagaaacttgggagcaggggaaaaatgatttcgacacacccagctacagtacctggttcgttagcggactgttggaaagagagaagaagcgggaatgggagcgggaagaacgttgcgtaattagactcccaattattggcgagagcggccgctttaagaaccactgtggggactgcctgcgaaacgccttggaggccgctgtgtgagctgcggctccgggctggtggccacgcgagggtgtccgccctcttcgacctgcctggatttttgtgctgcagaatggcagggcaaacagcgtgtccttcaccatctagagccccttaaggggttgtccaattcctattgggctaatcagtttgagactcatttacttttcgtgcctgggtctgtttgctggctgcaggcttctttagggaccaagatgtaattaaaatatgtgaaccaatacattgaaagttggtgttgtcatgtaagtgactgctgtagcttttctgagtgcctcacaagggcgatgtgacagtgagggggctctctgctgatgattctgcccactagttcttacattttgtgtttctttggtttagcagagcagtttcttcccccaaatgcaatatgggcagaacatttggaatattcgttctaacaatggcccgtcaagaagtgggcagatgattttgtcccagaatgttcacacgtcgataaatatgttaatgtttaataataaagagtttgctttctaaatgttagttggctgggtgtccttgatagtaccagttttggtggtagtgggcatttgcggtgacatcacagatgtcagaaactgaagcctggtgggtgggggtactgcactttcactcacctttttgtgcacgcatctatcaggaatgcctgagtcctttcactgggaaaaaaatgtggaaattctgggattcacggggtttgaggagtggttcaggcaaatgtaaatgagatccttggataatcagggatcaaagtccagtcccaaagccagacctaggtccagacaccttcccagagtgcttatacagtagtgctcagtacagggctagcgtggaaggggaattggagacacctggatctccaatctccccctccttctgacagctggacttagttgttcctcttctaaaatcaaatcaaactccatcattattccaactctgaagggaaaaaatattgctggacagtttctctcaatttaaacatatattttaaataaatattccctccacacttgatatgtttccattgtattaccagcagcgcaggatgatacagaattgatgtaacacattgttggcttgagtatttaagttttaattcatacagttttcatgaagttcaaaagaatgccatcatttcaagtttttttcagtggtgcttatagggagcctagaattattttataagagaccatggaaatcatctagtcagacttttctctttctggataaggaaactgatgccgagagaggttaaaagacttctccggtcacaaggaaaattagtgctgataagagtcagggctggtcgcggtggctcatgcctgtaatcccagcactttgggaggctgaggctgcggatcacctgaggtcaggagttcaagaccagcctggtcaacatggtgaaaccccgtctctattaaaaacacaaaaaaattagccgggcgtggtggtgggtgcctgtaatcccagctattctggaggctgaggcaggagaattgcttgaacccgggaggtagaggctgcagtgagcggagatagcgctgctgcactccagcctgggcaagagtgaaattccgtctcaaagaaaaaaaaaaaaaaaaaagtcagaaccctggtttattactttcaattaagtatgtattttcctattgttcacaggagagtaccccagccctgaaatatctctagatagtgaggatgatttccgaaggagtgccttccccatcacaactctcaaaccgctgaaccttatagaaaggagatttgcttttctggataattatcaacacctttaggctgcagtagaagtgatgattctgtttgctttttgaaaaaaaaaaaaaaaggaagcagagttgaattgatgctgttcccagtgtctgtaaactttgagaagtatgaattcattgttttagttagaaaaaaatctacttatataggtagacctcattaaacaaaaccaatgcaaggaccgctcctcagtggagcagattgctttttgaggtagagaacattcaagcagctgctagattgatttttgtactgggttagttggcattttcactaggagtgaaaactgtgagactaaacagtttaatttacttagaatgtccctctttctctctgtgtgtgtgtgtgtgtgtgtgtgtgtgtgtgcccgtgcgtcgggggggggggcagtggtgattctcaactttctaggaatttattaagtaaagtgtttagaaatggaaggaaacaattagataattctcagtgctccaggattttaggctcctacatttgaaaatacttgctgtcattaattgtcttgagatttaggcttttccacttttcaggaaatctagtagttttttgggggttttgttttgttttccttggttctgccctatgccaacctgctagtttccctttttattttagcctgatgaatcttcccttttgctttcagtactaaccattgctggtagttcttaacaggtctagcttttaccaatattgtcaagttagcaatattagctcctggggccctagtactctgtacttccacccctctccccaccagtaccatgctgcctgttcacatgatggacaccagctctgatattcaccctaagatataatccataagatgacaaacttgtattcaacaccgactcctactctggctaaaatgctgaagagaatactaagaaataggggatatggtcctggtcatcaagttgcttagtctgattaggaaaaaaaaaaaaaaaaaaaaaaaagagatacaaggaagcttaagtaaaaatataaggggttgggcgtggtaactcatgcctgtaatcccagcactttgagaggccgaggcaggcagatcacgaggtcaggagtttgagaccagcctggccaatatggtgaaaccccatctctactaaaaatacaaaaaattagccaggcgtggtggcgtatgcctgtagtcccagctactcaagaggctgaggcaggagaatcgcttgaacccgggaggcggaggttgcagtgagccgagatcgtgccactgcactccagcgtgggtgacagagcgagacaacgtcaaagaaagaaagaaaagaaagaaaatataaagagctgacagcctacatgcttttctgtagaaatctaatattttgaagcaaaagataagctctgagtagcatttcaggtaataaccgcccccctccccaacacacacataagcacacacaattatttaagagtattatgtgtatttagaggtggagaaatttgttcctagtgtccccggaaccacacagagtaggtgctgaccaccagcttaaagactggctcagaaggaaggtcaaatgggagaaggcagtctttgagggctaacgagaggaaagaaaacacacaaggctccctatggtgtatcccttatcatgtacttcgacaccatacacaggaaggcccctgaaatggaatgtttgctgttctttatacacttgctttgggtggggacatggaaagggagctggtggggctccacagacaacaggggtagtaatttctgttcccctgagaatatcagtggagacagctatgactccaggaaggccaagaagggagagggagcttcttaaccaggctttgtgaatgggtttcagaggctggcgtgtaaatctctgaaaatgtgtgcaagacattatgtatagaagcaacttgttctaaaggaagtctgttcagctctccatagcctttcaaaggttctaggatatggaaaaggcaagcccttgctcttggatgtctgatttggtgactgtcttatgtttcagagtcttcctgttcagatcccagacagttcttgtgttttactgccattgcctctccctgtggtgaagaatggggaggaggaaggtgtgtgtatttagtaaaggttctgaggtgccgcttaatcttccctgtccctggctggcgtgtccgtccacctacatgtctgccctcagtcttggaaggacgggaagccaagtgccctgcacagggtaaatactggtatgattcattttattaatgcttctgaaaaatgactgtgaaaacaaatttatcctcaaatgttccatcatcctcaaacagttatttggatgaccttcatgttctaggaatgtatgtggtcttaatagaaattatattttgcatcaggacaacacaaaaaactgacagtcttatttgtgccagtgccgtcctcagaactttacatggattaactttttaatcctgtgagataagccctgttattatccccacttcattgatgggaaagctgaagtctagaagggctaactgcccaaggtcgtataggtagcatgggcagagctgcattcaacctgagtaaaggaggtccccagagtctatactctcaatgggtgttccatacgcccttcccttactgaagatatctataaagtatttaatactgcttctgactcacaataagtgctctataaatgacaactgcctttgttgttttccttgtaattataattacttttcttttttgtgatttatcacttgcatcaaacctcacaagcagatagggattgaagatctgaaaggccaacatggaactccttgaatttcttatttttcatgggttttcctagaccctgacaagaggtggttctctcctgccccaagaaattcaaagctttccacatcccacccttcgctggtggcaagacttcaataattacttcagccttcggactccattgtgcaggagaacctgttagaagctcttcctctgtggcttctgaagaaccatcaagatgcacaggacttcctgtggctcttttgatcttttgaaattgcaagcacaggaaggaaagaatggatagggggataaagaatagctatgattgttgtgataatagcatgttgcatttctatagagccctttcgctgatgagccctgagccttaacagccatcacactgttggcccctgcactgtgaacctagagggtaccttgagtttttctagtgctgccaaacagaattgcattgacacataccttaatcaagagagaagcaagccgtgttggcaactgtgcatcacagtcgatgtggtggtcatccatgggatgcccctaatagcatctgtaattttcaagtagatgttgggtgtaatttggtgacccttgtctgttcccactgttggaagccccataactgatctgatgaaagcataaagtgaagaagagtggcgagaccctttgtgagatacctggagctgaagagtcaggtgtggaatggacaagaatgttatccacttctaagtgaccttgttttttctaatttcttaagaaatacctgtttgcttgactgccttaggctgtttgcaggggccacttgtacgtcagcaaaactcttactagatgacatcactgccagaagttccacatgtttccaggaggcacatttcccactgcccccactcccccgaacttggaaagattcctcagttttaaagttataagtaatttccatgccagataatgatcctgtgaacagatccttttctcatgtggaaaaatatttcagaaagggtgtcttgtcaatgagaaaaatgaccccattgaaacatatgtttatttgccatgtactcatctgacgttttgtgaattctataaagccatggaagtggattgttagaagtgtctcatacacccctagtgacttcttgaactatccccccatccccagccatggaactctcctattaaaaaaactaagagataagtggtagcaatcttaacaaattagtgattttatctggttaggccgtgtaatcaaacacgtgggcaggaaagtggatccattatgttgtactcatgattgtggtgctgaaggtaacccccattgccctgtaggctgcccccagaagcagggggtacagccaatagtattcttagaagttaatcaattctgtaacgggttgagtgttttggtctcatttttagtccgaggtgccctgatgctggcctgtgactaaggggagtcagtggcttgttatgaataagaggacacatgagctgaatctgagaaagttcagaagcattttataagttgtttaaaatacatccattaaagtatatgattattttttggtaatcatttaaatcattgtgctgtgtgtctacccagacagtatttatctgtctctcgatgttgtattagtatagtattaaaaaaatacacacatttcacttttgataaaaactttgcatactgtcactactttgtataagttttttcctgactgcctctggttagggggcagggagcaagaagaccagcatgctttccttcctttatatttgggaaatggaggtgctgagagaaacaagccacactgtctgaagtaaaacctagaagtggacctggttgtccatggtgagggaaagcccatatgtaccaccttgggctccagttacaaggtaatgagccatgagcacaaaagggtgactcaaaattcaatgccagccattctcattactaatgagcaattacagcaaatatttacaggcctccttcctacctttatgacttcctgttactgaagcactttggagtattgagaaagattgtcctggaaaaatacgtcacacacagttgcaggaaagagtgcctttaagcacacataaaaactcggttacttggctttgtttatgaattccacatagaaacaacagaaaattgtgccttttgaggaactgcttgagaatccttccttctgcatttcaagacaagattttaaaaatcacatatatcaaatatatggggaaatgagacacaatgtttttagagagtgtctagaaataataggactgtgcaagttagtacagcaaaattttgggtcaaagcatgggtcatttgacaaactctctttatgaacattacctctgcaatatttttctaaatgaaaacaatcacacttaatagaattaatcaggatgggagctagaagcatataattcactttccacagattggagtaaatcctcataatgcccctttcctgtgtatttagttaaaaaagcactccagtgagattgctttcgcagtaagtttctgtaaaccactgtacccttgtatttctctcctgtgtttccaagagttctcagatgctattttcgaatggcagcgttcactccagagctggctgaggtcaacgaagctaattttggtgccttggtgcccagggtgaagggagagagaagtcctctgcagagccaaaaggactctctggggcctgggtttggagcagtgtggtgttgctggacacaccacatttcacctttagaacctttatttgtgtgcttgcacaacaaatgtttacccagatattaagataaggaaagtatgaaggtcacatttcactggtgacaagagagcttctataaatgtaaccatatcgttgtgcagcgggagtctgtcttttattctgtacccgggacttagggggaattattggtgggtggggcatgggagttgaggctcttcttggttttctggctttcttgctatcactctgtttgtcttgcctcagctgatgtgcgcctcccatttggtaagggcctttgtcatggccaagacatctaaagaaatcctagtctgtgtggctgggcactgtgtggtcccctgactctctggagtcttccagagttccatggaaattagtgcccccgtgcatttccctgccgactgactggaaggcaccctggctgctgagatcgctttcctggtcccccagaagaggtccacatggtgctgatcctgcagctgttttaggcctcctcagcgggattgtcctatcctcggagcacagagaatcttcagagtgggataggggtttcttttgtggatttgggtttctcttagggatctccaaagattagctagacactcagggcctcagtaaagacatgggtccttggtctagttttcttcccaagggcagccaccatggcagtgggagttcaccttgctgactgcaagggaccccacctcacctctatcgcccattcaccatcattcactgtgcctcctgagttcctaatacacaagcctcctcccacagcctcaaaggcagtgctgcagtactcattcccacttctattccctcacactagctcctccatctggatgcttttcccctctcttcctattcaaatagctcctacttttctattgtgagcccaggcttcccgaaatcttacacaaaatcactaagggagcgtagaaatttccacagtggcactcccactccctgcattactagcttttggttgtttgccaaagagcctgcttatatttccttgttatctaatgacactttatttgtttttgcctttctaacaatatagcatgttcctgaaggccaaggatgtctgattttctgatgtgccctaataccttgcttgcttttttttgggggggggggctctgaaatcatgcttagttttttaaaaaaaataatagaattgctttgttcatgtcccttgggttacttggaaagcctgcctcacaagctctgctttctttattcatgtagatttgacccctttacttatttccctttaaaaagaaagaaaaaggaaaagaaaaaatttgggggaccacagtcaggtcttattgatacataactttatatcagatgcaaacgtcaggctagtattatatcagtgcttcacttcaagaatgccttatacactaatgtgagtacagccaaacagaatactccagcttaatctcaacgttaaaagcaagatggggaagttgtgcaagagggcactagctctcagttcagagatcatcttccctgggaagccttccctgattaactgcacattggttacccctgtgtttatagatggtcttcagtctgtattttgttatttgtatgatgcttttacaacttgcttttgaaggttgggggtggcgtatgtccctgatcaccactcaagtggtaagcccttcaagagcaaagacccagtcattttttcctgttcttttttccccacagaagtcagaatagaggtctcttgaggtgctcagtaattatttgtagactgagtaattctgtctatgtcaggaactttgggagtttggtgtagagaactggaagcacaggtagacactttgctcacatcaacctaacttatcctcattgcttatccaccatgcgtagagcagggtttgtgggaatcatcactgtgtgtagatgtttataggttccctcccaaattcaggtgctatgctgtacggtgaggttacaaagaggcattagatggaccctgcactcaggatgtcctaaaatgatttgtttaagcaatataagatgatttatgttaatggatgtccaagctgcctttacaatgttgccatcttgttaggaagtcacaaccaactcagataaaacattgagcaaacaatggaagattgatagtaattaagtgagagtgagtaagggtaaatagatcttgtgtgttgggaatagttagggaagtgattagtggagattagagggaggtttattggaggagcatgaagacctaggtctgtcttgaagattaggtagaatttggataggcagatgagtatggggcattccatttgaggtgaattgcgtaagtaaaatgagaaggcagcaataaacagagtgtgcaggccaggactggtgagccagttccttccagggctggatctggagctctgttagcagaaaggagatgaggaccaggcctgggctggtgttgggaagtttaggggcaggccttcctgagtcatgttgtgatggaatctttgggttgccttggggccatgggagcagtgcatgcctcttctggcacatgagaagctgctcagggcatctccatcattagccctccaaccagaagcctagctctagtgtgagcatcaagtgggtggttggaggaggccatgatttgtcttctataatattgacctcaaagcctcccctgctagcccttagtaaatcaggcatgtgtgaatgtgcccaaatcactctgatatatgtttctttttggcctgtaccacttctcagggtaataaacgccatgtctgagtctcctagtgcatggagtgggagctggaagaggacagcttgctgtatcctaaaatagcagtgaccctcatccccatgttctctttctgatggtaaagactttgtccccctcattatttgataaggttctctttctgatggtaaagcctttgtccccctcattatttgataaggctctcattctgtccctttctcattctggattctaggtttttgagtctaaccattatggaaagagaacagtcccttcaatatcccactatctgtagggcatgacacagccaaatccaagtcagaccatccctttgatcaatttctaccaataactgttcattgcacaccctgtacaaagcactgcgaccaagctgttccttgaccttctcctttcctagtgtttggtcacaacactccctaaagccctaactcaagttcttgggatgataccaccagaagagggaaaaaaggagccgtcttcctgaagtcacctgggtagagcagctggggatttttccctcctcgagcaggtgtaacctttcccctggaggaatttagaaacacttaaagtcatacctgaacactgtgggccaggccttggccagagatcccaagtcactggagaagattccattccagggaccagtagaggccagcgggtctcatccaagtcactttagctcattctgtccaccggtactttgagggaggctatataactcctgagtacttttggcttagaatttaacctcacaatgacaactgcgtgtttggcctttttttttgagacggagtctcgctctgttgcccaggctggagtgcagtggcacgatcttggctcactgcaagctctgcctcccaggttcacgccattctcctgcctcagcctccccagtagttgggactacaggtgcctgccacgatgcccagctaattttttttgtatttttagtagagacggggtttcaccgtgttaaccaggatggtctcgatctcctgacctgtgatccacccgcctcggcctcccaaagtgctgagattacaggcgtgagccactgcacccagcatatttggcctcttattccttttctgtccctctagtaatcaataaatgcttgtaaaactgggaaactgctgcctggcccaggcaggattggttggttcaatgactcgctccacagtcattctctgctcattgcctactctgtgcaggctgctgagcctcaggcccgagagcagggaagggccctctacagttaggtggaaaggagcctggactgtcagaaccaggaaaagactgcaggtgccagagagctttggagcacagcgcagcccaaactaagggactagtttcaagaatctcctaagaactcccctaggctagaaagtgttgtttacccaaatcttgccatggctagaaatttgagtctagcatctaccttctcacagctccaggtggacctccagaaggaaaaggaagatgtcctaccaagctaacctgtgactagatatctgttagggtgtgaaacctgtgaacatatccacgtcttttcctttgtgttcatttccttttctcttcctttttaaagtaaaacatccttttgaaaagttccaactttgcctttgctgaactcctagcaagtacttttccccaccttggctagtgagatgttgagacatgggcacacctgagggtggtgtggtcactgtggccgccagccagcccaaggccttgggaaagcctggtgagcagaaaacccaggcagaaaggagtctgggtgactgtgagcattgatccctttgttcctgagtcatctcttttgagcacatttgaaaccattttccatacccaaatcaacataatcttggtgattccaggccacctgtatctccttgtatggctccaaatattaccagggcaatgacgacaacttaattcttcttgagttagatcttcagggccaaggcacagtacatgtttattttggagagagacaaactttcacccacttgaatttctttgcctccaaaattagcgttgggatgaccacagggttctgtgtttcttggcttttatcttgccaaacggattgtaaatgctcccgagtcaccttctctttttttgtgtccctggcaaagcctacctccacatggggttcagaggagctctcaagtctctaggagtttgaaagacttttctagatctttctctgatgtgtgtgacctaggacaggtaatttaacctttctttctttaacccctttcctaagtggggttagacatatttgctgctttctcagagtactattatgagtttgaaatgagctagagtttcataaaaccatgcatttttaaagtctattatattttaaaaatcacttttgcaactattatctcaatagaactttgaaaagtttaaagggcagaccttcaaggcatcattattaacaagcacagcaatataatcattaggcacattattgcctgttgatgtgatttggctgcagttggaaggcagccttaggaaaagctaggggactcttgctctcaggcctttaaatttcttacctggctgggattttcagaattattagtttttactaataatgatttttgggtatcagttctatttttgcccataccctgagatgtgaggaaatctgattatacccaagagaccaaggacacttccaggattctagataaagggtctgaccagttatgctcctttctacatctggcctgtttttccctcccctgtggagatggaggtggtttgtgcaagatgtgattctgtcgagaatgggaatatcccttcaactcagcacacccaaatctctaaacctaaagagctacatctgtaccatgtctgctcaggtcctacttgttgctttgcatcttatgagcaagacctaattgtgggctcccaaagaaagcagatgacttgcccaaggtctttaagaggtcagacagctactagcagagaaacagagcgaatgttgacacctaaaagataccttgtccttccggtgttactagaagtgggaaaaaggctttgagtgcaaacgcctggctgtgctacatactgaccatgagatgtgacaggccactcagctctggcctctgatccttcatctgtaacatctttgatgcccctaatgcctaagcttgctcatccctcagccccacccatgaggctggccagttaacttctgccttcaggtctcagcttaaatatcacctccctagggaagcattttctcacctcctttagttaacctccctcctgttctgttttgttttgttttagcagtacttcccacatgttgttatttatttatttatttatttatttatttttgagacagtgtctcactctgtcgccaggctgcagtgcaatggcgggatctcagctcactgcaacctctacctcccaggttcaagcgattctcccacctcggcttcctgagtagcggggattacaggcacgcaccaccatgccaggctaatatttgtatttttagtagagatggggtttcaccatgttggccaggctggtctcaaactctgacctcaggtgatctgcccgccttggcctcccaaagtgctgggattacaggcatgagccacggtgaccagccccacatgtcataatttatttgcttatcatctgtcacctttgctgccccctagtatgtaagcttcatgaaggcagggaccatgcattacatggttactgccatatcctcagggtttggggcagtgcctacacacaggaggtgctccttaaatgtttgttaagtgaaataatctgaggttgtcaggtctttgtcttcaacgttattatttcttatatttgttcagtgcttaattttttttcaaagctcttgatgtagattgaagcttttgtcatttttgtcatatagatgaaacaactgaggcacaaaaatgtgatcacaaaaccagagagtggcagtgcctacctgaacagctcccagacccagactctttccacagacccatgctgtctctcttggcaccttatttttctgtcgtggtgatgttattgtttgtcttatttggcaatgtttacaccggaggagtagaggccattgtgtgttggtggcgtctggaaatacacaagagagtcccaggagaatgccactgtcggttcttaccacaattagcaattgtcaggtcaggggcagtgattgggtcggtgtcactctctacatggctggctctgcgtgttgaaacaccactgcctgtacctccacagatgccaaagggagtgtgggtcctaggactacagccccatttctacccagccctggctatctctccactcagatctaggtcctttctgttcaggaaaacgtcctgtttgtgtagcctgctagacagcaaaggcaagtgccaatcagctggatgatctctctgggcctcagtttccccatcttcacaatggactagtaagtgggaaccagtcaaaattggctcagagatccccaatagggttctagctccattgtgaaataaatttcaagtggagcctcgtcctgactcctgttttcacatgctcccttagagggaaggaaggtggacgattaaagatgattggtcgggagctggaggaaggaactccccattctccaagaggaggttctgttggaatagaggggcagagacttggaagtcgctgttgggcatggcccaacccacttccatgacagcagcaagaccaccaccctcaagaaggaggtgggctggggtacgagaaggtgggctgcccagtggtttctacaaaaagggatagttgtgcttgcaggaggggtagtgtctccatctcctgatgccagggagaaggaggcaggctgctggggtgacggagagcaccctcaactaggtcacactgcactccctctgtgcctcagtttccacttctgttagatggctgatatgatctctgccctgccagttggattggggcttccaaaatatcaactactgcaaaagaagaggttgtggccactgtgactcatatacatgtacatgaacgtatctgaagttttcagggctgatactgatgtgaggcaacccatgcaggcaacccggaggaactgtgtccctcactctgagacagtgagaacggactgagccggaaagctgatggccgtgagaggagcaggtttgaaaatcactgaatgaagtcatgttgtacagagggggcgggggtgcatactgtgggacggaggtgagtcacagtgcataagtgttggggagtcaccttgaacttgggccagaagagtagaaatattgagacttgggtttatctgcctcacatcaggtacatcaagttctggatggctgcccactggccagagacatgaggtggacggctcccttttgctgccctgggaaggccttctgctggcttcggccccactgagcaaagtctgcttgttcactggagttcacacagactccttgccaggcctgcccagaatcctgtctcctctgacttcctgtgctcttgcataatatttccttgctccctgaatggctggccccagtgcaggagcagctcactcacactgctggaccgagggcaggatgtagagggagggcagggatctgcaaacgtcacccaggggtgctctgggctctgagggtggagggcaagaggggcagagccccctcaaattctttggaagattatagcacaaggggagttgggaaggccctgggaccatgtgcacacacatctatctccatgaattgtctctcctgtaaaattatttttaaagttgctaagttgttttcttctgattataaaaaatatacatgttccccataaaaagtcatagtaaaagaaggcatggagataaaaataaaaatcaccaaaattccatcacccagagataaccactgttaactctttggtgaacatacttttctctatatcatgaatattgatatataattacagaatacgggcatacttctaagatattgtaggttcgttccaggccactacagtaaagtgaatatcacaataaaacgagtcacatgatttttttttgtttcctcgtgcatatgaaagttatgtttatattttagcattatgtctaaaaaacaatgtacataccctttttttttttctttttgagacacagtttcactccgttgcacagactggagtgcaatggggcaatcttagctcactgcaacttccgcctcctgggttcaagcaattctggtgcctcagcacccccgagtagctgggatttacagacatgtgctgccacacccagctaatttttgtgtttttagtagagatggggttttgccatgttggccaggctggtctcgaactactggcctcaaatgatctgcctgcctcagcctcccaaagtgttgggattacaggcatgagccaccgcacctggccaacaatgtctataccttaatttaaaaatattttattgctaaaagaaatgctaacaatcatctgagccttcagtgagtcataatcttcttactgggagaggttcttgcctccatatcggtggctgcagaactgattagtgtgacggttgctgaaggttggggtggctgtggcaattccttgaaatcagacaagaatgaagttttttacatcaatagagtcttcttttcaggaaagactctgcagcatgtgatactgtctgatagcattttacccacagtaaaacttccttcataattggtgtcaatcctctcaaaccctgccactgctttatcaacttagttgatgtaatattctaaatcctttgttgtcatttccacagtgttcacaccatctttaccaggagcaaattccatcttgagaagccacttttcttttctcatctgtaagaagctctgactcatctgttcaagttttatcatgaggttgcaacagttcagtcacatcttcaggctccacttctagttttcttgctatttcttccacatctgcagttacttcctccactaaagtcttgaacccctcaaagtcatccgtgaggtttggaattaacttcttccagactcctgttactgctgatattttgacatcctcccacaaattacaaatgctgttaatggtatctagaatggtgaactcttttcaggtggttttcaatttactttgcccagattcatctaggaatcactatctatggcagctatagccttacaaaatttcttgaataagacttggaagtcagaattactccttgatccatgggcttcagaatggatcttgtgttagcaggcatgaaaacaacattaattttgtgcgtctccatcagggctcttgagtaactaggtgcattgacaacgagcacataaacatatgtgctgtcatccaggttttgttgttccactgatagagcaccaataaagtagatttggcataatttttaagaaccctaggacttacagaatggtaaatgataagtggcttcagcttaaactcaccagctgcattagtccctagtaagagagtcagcctgtcctttgaaactagggattgacttctcccctcttgcagtgaaagtcctagatggcatgttcatccagcataaggctctttcatctacactgaaaatctgtttagtgtagccaccttcatcaatgatcttagctagatcttctaaataactggctgccgcttatgtatcagcacttgctctttcaccttgcatttttatgttatggagatgtcttctttccttaaatgtgacgaaccaacctctgctagcttcatacttttcttaatgcagcttccttaccttgctctgccttcctagaattgaagagagttagggccttgctctggattagactttggcttaagggaatattatgcctggtttgatcttctcactaagcttaatcattccttaacttttgatttaaagtgagagatgtgactcttcctttcattcgaacacatagagcccattgtagagttattaaaattggtctaatttcaatattgttgtgtctcagggaataggaaggattggggagggggagagagagatacacacacacacacacaaacacacacacgcacacagaggaacaatcactggaccagtcagaacacacacaacatttattaagatcactgtcttatatgggtgcagtttatgcctaaaaacaattacggtggtaacatcaaagatcactgatcgcagatcattataataatagctataataatgaaagtttgaaatattgcaagaatgaccaaaatgtggcacagatatgaagtgagcacatactattggaaaaatggcatggataaacttgcctgacaaaccttcaatttgtaaaaagtgcaatatctgcaaagtgcaataaagtaaggcataataaaacaaggcatgcctgtgtttcttaaccatttaacacgtgtaaaactgtgctaccatttttattaagttcccatattgtttttgtgttgctgagaaagtttttgagtgttgtaccctaacctcttctttcccgtaagctctgtggtttttagttttgcatagtgtggtgatttttaggagctcatatgccatgttgtagcagaactacttgtaaattcacatgacgtgtcttccctaaattcaacattaattattagttattaatagtattaattgtgaagcacaataaaatgaggtatgcctgcattatcatgttacatgctattgtgaaatgcattttctatatagcaatatatcagaactatctcttgctactaagttacaaagatttaatacatagttgtattaagttccacttatagaggtatcatagtgaaacccttattcattgacatgtccaggctcagaaaacaagctataaccagcccaagcttattttcagacctgaaaagcagcatcttttctatatttctgaccaatgtgttatctgaaaagcggcatcttttctatatttctgaccagtgtgttagctatggtgccccagaaatagctgcaaaataaaaggttaagtgccatgtaggcctttctctaggcttagaataattcacttgattacataggaagaggctgcaatgatgacagcttccagggctgggccagaccttaccctgggtaaaatgatcctccagtgtggcccatatgtatgctttgagccaggagctgctagctgggagaacaagtttttcttcagtggtattcctgtgaccaagatttcaaataagctccatttttaattttaattggttattgtcctcctgaaattttatgacacaatctatatctttaaaaaggcactctttcttctttatacagttgttttcatgatgttaaaaactttaaagaaagtatcattcagatttgctgacagttggaagattattttaaaaatccaactagtttagctgaaaaaggtgctatcagtgtttctgtctcatccttggaaattgtatatttttaaggcttgtgattagctttttctcctccattgctgatcgtggttggaagtgtggcatagatttacagtaaactttgatataatggtgattcctctttgttttggagccaggtgcctgcggtatttgcttattttctttgattcatttttaaattgagttgaatgtttgatttaatcagaagtgatagtatgaggctggggatgattgcttgtggttgggaattgcttgtaaagtttactgtttagtcaagacaaatcgtttcctaaagctctctttttcagatttcttgtctatgtgggaaagcatgataatgccagtcagtttaaacatatttaagagttcccaggcatcttcgaacagaaaaatttgcaacaaaatttggcaacggcagaatgcgaggatttttgcctcattttgtttatagttgtctgctcttcaggcaaatgatctattacaacaatctgaataattacagtctctccttcaatttattcaccctggactcctttttctagaattactggccagactcttattacaccaaattccttgactctattcccgaggaatgaggatgggactaggagtaaaagttaaagagagaaactaattgttgcctgcttttcaaagttttcggtgtgtggaaatttgttgattttgtaattgctcccttagttggtcattacccgattctggtagggtacttgccatgtgtacacatttagggagtgcaaagggacagtaagacttaattggtcctgggaattgttgaacaggactttgttgaaatggctacttctgtacaatgcacatggagcagctgttggcatagcaactcctacgtggaaaagtgcacgccgcttgcagatgacttttgcagtgctcagtgttaatttgataaatggcttttctaatagcagtttgtgggctaatggaaagatcgaagcaaaccttcattaacggaaaggagaatagggattttgaagccactgggtgaacacactggacagccagagctaaatctccattttcagctgtgtctctttttcacagcagatatgcttggagtgtggcagatgaaagtaaattaagaaaactgtctgcccgtgccattatcatcttagattttaagcagggagaggttttggagtcctttctattcaagatacttaactttgtgtgagagtttagtttaagagtactgtagaagctttgcattgtgttgtcgttttcctttgctggtagtggtggggttaaggtggttaaatcgttttttattgtggtaaaatatacataacaaaaaatgtttaccattttaactatttttaagcctgcaattcaatggcattaagtacgttcatattgttgggctacaagcaccactgctcaagaactttttcatcatctcaaatggaaactctgtactcattaaataataactctttattccccacatgctccaatccccgataatcactattctactttctctatgaatatgactattccaagtagattgtatatatagacatataaagtatttgtccttttatgtctggcttatttcacttagcataatgttttcaaggttcatccaagttacaacatgtattcaaagttttatttctttttaaggccgaataatatcctattgtgtgtagacactatattttgtttatctggtcttctgtcaagggacatttgagttgtttccacctttgggtgttgtgaatcatggtgaacatggtgtacaatttgagtccctgctttcagtttttttggatatagacctagaagtggaatttctggatcatatggtaattctgtgtttatttttttcaaaaactgctgtactgtcttccatagcagccataccattgtacattttcacgagcaatgcataagagttccagtttcttcatttccctgctaacacttgttattttctgttttttgttttgttttgtttttgtttttagatatcagccatcctagtgggtgtgaagtggtatctcattgtggctttgatttacattttcctaatgatcagtgatttgtctttataaacatattgcctgttccttgccccccaccccacccccgcacccccacaacagcctgtgtgggaatggaaatcactgccccattgtttacacctgtgaggcaaacaaagactatcaacataatgatatttgggagtgaaaggtgtcagggagagaaggatgaaggcaccataaggttattatatataataactggcatataggatatagtacaggcacctcagtagacctattttcagttcgtgctgtggagcatgtgaaactattttaaatagaggcctttgggacttaagtaacttcaactctctgaatgaggtttaaggcaagcttgctgtgggctggatctatcctgtataatccctactgatttgggtgatgtataggtacccttccctgaaattcttccctgagaataattattgttgtcatctactacggaatcctgggcccactttcttccttcttcttgggggaggaaatctcccagacatcttgccaagcatttgcttaagtctttgaaccgctgcactagctaatttctccacctgaaacaatatacaaacccctcctcttctccacccgctaggttcttatgctggcagctcatatttttacaagaaaaagaagttagaatgtattgagcacctgctataagcctggcactttgctagtcactgtgtggcagatgactacatcagtcatgactgataaaacataacttctatccttgtaagtgccgcaggacttatttgtgactcttaacaacaggggttccaaaccttagtgtgcatcagaactgcctggggcttattaaaactcagattactggacctcatccctagaatttcttactcggcccgcaggtctgaggtggagcctgagagtgtgcatttctaacaagttcctagatgatgatgatgttgctcatccctggaccacactatgagaaccactgctttccatcaagcctgtgaaatagatattattcccatttatagatgaggagctgagatgtagagaggccaaatgacttgcctcagttcttgcacacagagccagagcccagatttgaagctgagaggcctcactccaaagcttctgctgtttccattatatcagggatggcaaaggcatagataccacctgtgcttccctcacttagtccacccccacgacaggcaatattaatcaatcacagcacctctgagcccagagatgtcctcggaatctttcacacactgctcctgacagccaaacctacccgtcagtgggagctgaagtttgcaatttctgtactaacctgtatggcctttctaaaatggagacattaccaaggaatcaatctattaacagctgaaaacaaaccttgtgtgagctccagtcttatctgcctaggagggaagagcgtggtagattgcaggctgtgtgaagcacagcactcccatggcgacctcacggatcataactagagtctacactcagcacacaggcaacacagggccgttacccttgaaaagtgtaaaaatctagacgaagttaatgaggagactttttttttaagctgctatattttgtctaattcatatatgctacattttattctaaaaatagttattctactctttggcactaagtttggtgatggatataaaatagtgatcaataaacagttgttaagaaaggaaaaataaagtaggtgccaaaggcaactgtgtccacacctgatgaggtcttttaacaaatggatgggaggaataaacaagactgaattatgtttttatatatcttgcgcacccaacagttcttagcaaggcccgtgggcagtagatgcccaataaatatttatcatacggaactacaaatcttgcttgtgaaagtacaaagcataggtgtatcctggaggtagggaacagtaaccctgagagcagactggtttaaggccatctctggccaaaccaaaacacattacagaggctctctgagtcccaaagtcatccacagattgatgtcttgcttctcttcttatggcataagagactggtagaaaactgaccaaactcatcaagaaagtaatatttttttttcctctgaaaattgtgaattgtatcagatattgccactattatgcccctaggtcacttgctcatctgttttccacagggaagccaaaacagaattttgcaaagatatacatgagtaatcaaaggaaactgactgtattgggtgtgattctcctgtcttctgaaataacccaccatgatcttttgcgtgtttctgccagcccatacaatgtctggtctcaccaccaacaacaaatatttagtctatggctactgtgtatatagggcaacctcttgtctcatttgctgtttgtgcagcttaaaagcaagggcagggtgaattatggtttttttgtttgtttgtttttgagacggagtctcgttctgtagcccaggctggagtgcggtggtgcgatcttggctcactgcaagctccgccttctgggttcatgccattctccttcctcaccctcctgagtagctgggactacaggcacccgccaccacgcctggctaatttttttgtatttttagtagaaacagagtttcaccacgttagccaggatggtctcgatcttctgaccttgtgatctgcccacctcggcctcccaaggtgctaggattacaggtgtgagccactgcgcccagccctaattatgtttttatatgaattgcacaccccacagttcttagcaaggcccatgggcaatagatgcccaataaatatttatcatccaaaactacaaatcttgcttgtgaaaatacaaagcataggtgcatgctggaggtagggaacagtaaccctgagaacagactggtttaaggccatctctggccaaaccaagacacagttaaagggagcatttatgtccctgtttggctgtgatatgccctatagactggggcaaggctgtggcagcctggccaggatgaaaacgctcatccttgggctgcccctagatgccaaactttttccgtacaagttttcaaggcacattattaaaagcagttacgtaagtggggaactaactgcaccttataaaaggcttaacaggagagacagagtcctccatttggagctgttttgttaaatgttgagaatagagaagtccagaagtggttggtgtttctgctctacactgaaaacgaattgggctggagcccatctcacagcctgcctttctttcttctatctcacccagcttgggcacaggcttttgctatactgttggactgggcagttccccattgatagagatgttgtttaatatttaagtatgttgtgtagctcttaacatcgaaagagaagaaaaaaggtccagtttatctttagggtgagctgacctttccagatggagcagggaaatctcctgaggacaggaccctgggaggaatccacttccctgcttaaaaagcatggtgaggaaggttcccttgggcttgttggatccagtactctccagtgggcagtgctctgtatgttctaggttagagtcttagataatatgggattttaaaaccagtattgtattacattagagtattactgcccttgggaattttttagatagttccttttggggagagaactgttttgtcctatccattgcagatgggagcaagaacatacaaaagagcataaagaaaaattctgccgatgtgggcatttccttgaggctgagggactaggagaggcaccaaagggtgtccttcattcatggtaaaagccctaatagcctcagtgttagaatatcctgtaggcaggcgaaggatgacatgactcactttggtggtgacctcctagtagttcaactgagaatccaggcgggataagatcagtgcagggtaattgtatggtagctagtcaacctttccattgcttagccggagaattctggcttttgtgctggtgatgtcaggcaggtgttggaggaggagttccatgaccattttctctgttcctgccaacaggaaagctccattgggacatacacgctcacttccagggtgttttatattcatccatagctgctgcatggataaaaaatttggcgaaaaacttgaaatcctattaccatgatgatcattagaactcatgttagggctttttgtttttaaaacagggacacaaagaagaaacagaaggctgccatatgcaaggttagtgaaagccccttaccttcaccccatttaaatcctgaagagggaaagtagctaagctgtagtgatcacttcctgcaaagaaaaccataattatggcgcccagttattcttcataaggggaaaccttggaatagcatgggtgctattttgaatatttgagaaaacagtgacattcaatatgaaatggaaatgattctgtgctgctgggattggatcagttccttctaggcatcagttgcccctggggatagcctagttctccctcctgtgtgaatttgggaaacactagaatcttgtagttgttgctgactctcccaccagcagggaaccaacttatgctcttgggagaagcagggggagtggggaatctgcttttctctttaagcttccaatctcaactgcctaataacaagggaattcgactatcaagatttcctggagtggcttaagtatgggcgccaggatgcagtcttctgtacacagtgaaagaaaacgggggtaaaaaccatgatgaataggtgcagagaggagtggctagatcacctgcctgggggatgagcctcccacgtgactgtaaggttgtgcaagaattgggcaacatttggtcagggtggagaggccttgacaaagcatttgtactcccactagattcctatctcctccgtggggaaaaacaagtatttaaagttctacacagtgttttaagaggaagaaatggattgccttactaccctagcatacttcatttgtacatatttggagttctattcactaagcacccactgtaggaagggcactgggctgaagatcccagaaaattaaaggagacacctttgttcctgcccataggaaatatagtctagtgggggccaggaaggggtaagacgagcatacaggtgatcatactcaagacaggagatagtaaataccctgatatggaaatagggaaaatggttctaggggttttggagaggagaagtgagagggaggcggtaagcctgcaggccctggagccagactgcctgggttccagtccgagatttaccacctatgagttgtggtatcttggagaagtcacttaaacacattgtacctctgattcttcaactgcaaaatgtaggtcactgttgtacctatgtcagtagataatggtttactgcccataaacattggtctcagcttcaggaccagcaggggccgtgctgaccttgagctagtgacttacaacctccaggtctcagtttcctcatctgtacaatgaagagattagactggataaatgctaacattttctttattctaaagtgccgtgatttcatggttgaatatgtattaaatgcctgctgtgtgcccaatattgtgttggcataatgaaaaagagaaaaagtaggatatgtggtccctggcctcaaggagctataatctaagtgaggagaggacattaatatacaggagagtattagagaattagagaatattagaaattaaaagctaggtggtatgggcagtgagaacataggaatagagattttagaatggaccagagtagtcaggagatttgatagtgacctatctaatgtttagaaccacagagactttagacaggagctcagacttgtttacaaatcccatgaattctgaagcttggaacactgccattaatatttaaattaaagttgaactgcagaaaaacaaaagttacctatttggaatataaggtgggacaaagtttataaaactccatgtctaaaaccggtagtgtggatggaagctataaagaggctcaaaccagcttcccatatatccttggatgacaattccattagaatatagcccctggcacagagtaggcacacacaaaaattcatctgttgagtgacttgtggaaaaagtgttctgccctgttcagctttgaacagctgtgggcaccctggtggtggtctcagccccacctccagagggcagtgcacagaggaggccccgccagagccctcctgccaagtctttgggaagagcttaatattgcctcatgcctcctgagccagccctctatcaaaggtgaattctctgctcccaaatgttaacctacctccgggggggctacacgtactccctccccagaattgtctgaacttaggttttgagaaaacttggcaacagcctcaaatttttcttccagtctaactatcctatggtccccagagtccatatgcagatcgggctgttagtgaccctggcttacacaggtaaaaaagagacttaacaaaacttggcagagactgctaagtgccaaaagagtggtgtagacagtaagtgaggtcaccccggccaggaaattgggggcacctcctggaaggagggagagctaggagcttgagtgggtcttgaagaatgagtagaggccacgatggcaggtaagacaggtggaggcattaagtacttctgtccccatgaccagttcccccataccactcttcgttaaccaaacatgggaggtggcaggcccatttagatctggtgctttattctaagggaggaaatgagatgaaaatgacagatgaagtgcaagcttgaactccctggcctcaaccagtcactgagaatggctgcccatcccccaaacagtcagtgatggcctggtttgatgggcctgtttatgacctcctggcttgagagcagcagaccacaaaccttcacagagctctctgttgaatttccttcccagtacagaacccagaagtcctagttataaatgtcactacactttatttatgtagcatcctctgtgaaaacatgagtatatatcatatctaccatcagaacgtaccttcagcaatcacttagaacagtggggaggacagatggggtcttcaaggttcagaaaggtgaaatgtacaatatcttcccattgtaactcttcagagcaaatcagaggtgaaaatgttcagaacacaagtctgccttccaggccagtcttctaagcacctttttcttctctttcacattttacccttgtctcattccctgttccctcctcctttttgttcataaaaaaaattatttttttccaaataagcaaaatggagtcaaactttgcatcctcaaaatgtatgaagtaaacattattcctaatgagcctctgggaaagtgctcacctttgaacttggccaaggattatgcagcaaagaaaaagtcttaagaacttgatagagtgttagagcttcctgggtttttaaagtcaagttgcatattacatttcttttccttaataggggcatttccagaaacccttcctggttgagtaggccagtgtctgaaagtgaagcgctaggattggttactgactctggttcagggattgtcatctgggtgcgaggcaaccacagggtaggaggcaccattgctagaatgctctttctttcctaggactcagcacctatgccgacagtccttgcaagacaggaggggaacgtgtaggctatcctatttatggtaaggggaggcctatggaaaaacaggaagatggtcaagggaagctggcagcaaaaaggcaatgagaccgaggagttgtccctgtaagataagctcttttccccttggagaccttgcctattaattggcctgtgctcatctctataggctttctattaaaacacacacacggccaggcgtggtggctcgcgcctgtaatcccagcactttaggaggccgaggcgggtggatcatgaggtcaggagtccgagactagcctggccgagatagtgaaaccccgtctctactaaaaatacacaatttagccaggtgcagtggtgggcacctgtaatcccagctacttgggaggctgaggcgggagaatcgcttgaacccgggaggcggaagttgcagtgagccgagatcacaccactgcactctgggtgacagagcaagactccatctcaaaacaagcaaacagacaaacaaaacacacacacacatccttcttaaagacaaaaacacctctggctgtctgcatagcttctgcctgcctctgtggaatattacacattttaaattccccaactattgcctcacagccaagaagttcacttataggcattgagatgaatcattcacagaatgacttaaatccaactaagaatgtgtaactgctgaacattctgattgaggttccagaccgtttgtgatgccacatgtttgttgtaacaggcagaatcatcagtaatactttgtttctcttttcttgaaactttccctccaagtttccatcttaatgctttaaatcatgacagaatcaaacaagctctgtgccctctgcccctgacccccgtgatggcatgagcttcaccaagcacccccattcccacagagatctgggataaaaggctttacagaatccagaatccagctccgtttctgagctgttatcgcttcatagcacaggctgtctttttctcttcctacacgtagagctaggcacacatagatgggtagtgcactgtccctgaactgaggctctctcaagtccaggctaccttctgcccagcacctacttagtgtagcttatcttttaaaataagccatcctgcaaagagcagggttcccagtggccttgaggtttgtcagaagttctctagaattggcaacttagctgtgacctcagaagtcttggctctggcaaagcaaggtctttgcgctaaaacaggctcagtgcccatggagataatcacctcttgtaatatccacacaatcatctcattgtcaaagcacaaggaatgcaaaaatagaagaaatgccacaatagggttgccccatggttcagctaaaccaggattctgcttccggctgagggcaccttgggacaccttaggagggatggtcccaagcattgttctggagttcagcccctgttggcaagacctgtcctcctacaaccatagcctcacggggcctgattttgccccatctttttgggactcctttaccacctccttgtcctggctaactctcctttgtccttaaattcacaactggggaaacccttgaggagtctttttttttttcctccccattttgggttatgtcatctttcttgctcccagagcacttgctcctgacttctgtagcaatggcctcaacactattgagtgtgtagtatttcttaggcatggttctctgcatacatgtatatattatttattcctcacagaggctctgtaaggcaggcactcatagacgctgaggtttagagaaacttaagtaacttgccccaggtcatagagtaagtgtccaagtcctcaagcccgggcagtcctgctgcatctgcatggcacatgcgcttggcctggtctgctcagtgtgtctccctgactgggctgtcagttcctggagggtagggatctgtcttcccttctctatccccagtgcctggcatgtagtagacactcagtaactgtcaaataaatgaaagccctggctcatcaaacaaagaccagatgtgatttaaattccaaggagccatactttttacaaaaatgctaaaatgccaagaagtactttttcattaaaacaaaacaaaactgttttagctatgtaagggtggccttttagaactctgactgctttagatctttcctctaggtggcatagagttgtggggtttggcagaccaccatgggaaaagaacagatgcatttgtcagaatctctgtggccatcagacgtcactccaatgaagccaaagctccgaggtttaaaaataattaagggaaataactaagcggagagacagaaaagaccacttcttagttgattctggaaaaatgaaccttttctttctaccaaccggcaccgaaattcagagtatcctggacacagctgagagactactcagggagagccactgcagtcacaccccacctccacttaggtctccctacactcactctaatcttctaaatcgtttaatcagacacggcgctgcctctgaggcttcaggactttcaggctgtttttttttccccgggcttaaagtctttctctgctgctgactcacatgttaattattgctttgcataaagtagaattagcagtgctcctgcactcacctgcctgcgtgttatacaactgttttatctgctggacagaactgagtgtgcaggccggcctgccatggtgtcaccagcggccctgtcttcagctgccagggcaatgagcatcgcacagaaaccaaccattgctttagaggctctggggaagaggctgtggggtgtgctctgcttgtcccaggaaaaagagggttaagtgccaagttttgaccaaaatcttataagaatggtccaggagtttcagttccctgtcacctgtcagtgttaatggacagaactggtgtttcacagaaaaaaaaaaaaaaatacgtgtgtgtgtgtgtgtgtgtgtgtgtgtgtgtgtgtgtgtgtatcaacttgttttctctttggctgctgggctggataatgaagtaaagatgacattatctctaataaaagtgatttgcagaaatcactgacgggacctcagtagcagagattcgccattagcaggctagccagataagaggggcagctgggttctgttaaccccctcctcgtctgatgtgtgtcttgcagggaagtcaaaggcggaggagtagagtagagtggactttttgaagtttgggctaatggacagtgttttttccaaagtgtgggctgttctttagccccacttgctgatctttagggatgtcattaggttttcatttttgttttgtttcttaggatttttgtgttagtggctttttccccctggggcttggcccattttctcacctctatgttatatcaccagaagggtggaaccctggccaagccctggcatcctctgccagaaatctgagtccaagcagggcacctacacatgtgaggtgagggctctgggccacgggtgttgggcaacagattgttctgtagtgtcgaggaggtgggatctgaggcagaaacctccctggcctcttaaggatgggacgggtcaggaggggaggggtctgcccttgtccggacttgttcacctgtgtcagtgagagctgactagcagctggctcacgaaacacacccatgatgtggacagcgggcacagccagctacttctgtgtgaaaacatccttagtatacagggatttgtttcctggggacagtgaggagtcatggggtgttaagcaacctagtgatgaatatagccaccatcactcgcctttattaatccactttctactggaagcactaaagcattggaactctgcaatacccccacagctgggggaccgtgactgatttaatcttcatgccagctcaccataccataactgaaagggctgtatgacactattattgttggagtaaggtactttgatacatgagaggtttgacattttgcctgtgccctcagagaaccttaaaactaggactaacaaggtgacggtgccttgcagtcaagtagcacagattgtctaagtgttccaggcaggagtgaggaggagacaccagtgtaggctcggtaagatgctcagaaaagcctctgtggaggtggcaggcctatgttggctctcaaactttagggtttagaaggtcagaaaggaagaagcacttcaggtggaacaaatcaactggggacatggctgggcagcagaaaggggtgcggagtttgggggtggcagggcatagtgtggtctggctggagtaagcgtggagctacaggatcgtaggagctaagtttggaaagggctgggagacctcaaggagcacgtccagcttggacttcatcatgaggatggtggggagcaattttcattttaaaatgggggagcgacaagctgaaaatggttttggggaaagagtggtgggctggcgagctgttccttgccccaagatctgactcaaattttattcttggtcagtggtaaagaaagtgaggggcaagggaaacaaacagaagatggggactaaggtctgtggaaataaataaaacaccaccagagccagaggaggcgtgtgccctgggtgaagtttgtttttcatcccatgggtaacatttatgagttactgttcagcaagaatgccttgcggaggtctctgtggactgagctgaggctccagcctgtggcagcccaggaattgctgccatatttagagcttccaacagagggtttcattttccttggctttggtgccaagaaaagaggggttctcacacttgctgtccagcagggccaaagcatgaccagcaggaggagcatggaggttgggttctggcactgcccaccacctggcacctcagccactaatcagacaacaggctaggcaattatccgggcatctgactttagctacctgtccttttgtttaaagccctttcgtgtgcttggcaccttatggatactcaacaaggtctgtttaatgaatgcgttctccccacccagattctcaatgccttgctccctgttctctagcctgtctcccgaccactggcacctctgcccattcccagtgtgtctttgtcatccctctgccatcctgattgcctccctgtatcctgctcttctttcaaagccaacctccagcagagttctccctgtcttctccagccttgcaggctttctcctcccaaactcctacagccctgactgttcagcccattcttcaggacttggctcttcacctctctgcaagctccctgaggtcaggcatagttgttccacatttcattctactgctcacagccccatcgtaggaagagagaatcattaatatatattgaatgagcagagggaataagccattgctgggggaaaaatacagttttatttcccaaattgctcaatgttatttgagagcatgataataaatttggaaaagacttttagcatttcctgtggcttttgatgacttctttacaaaggaatggaaatgtgcgcagacatctcacttctcatcagagcaagagagggcagaattgggggaaagcaagtgttcgcgctgtggcatgaatcagatcccacaatactagacatgtgaccatgtgaacaggcctcagatcaggattctttataaaggaagcccaggacagattctctaccagctctctcctctttcacttttcctctttctttgctttcctttttttaatagggaggggagaaggggttatgaggatgggggtaggagagtgagggatcccgtgctttctcccccttctcttgctgttttgaaatactttaaattccaggaaccagaagttctggcaacatgttgggattagtaaggcagatcctaggatatttcactattagcatgtgatcaagcatcagtcctgattaaaagtctaaacaaatgttttctttgaaattaaagtgtctgaaataaagaagagagaactgacccttaaaatcatattctgtacttgaaaagagttctgacaactgtctgtcccggttatgtgcacccccgccccccacccgcctttttccatccagaatgtttgacgacactgccaggggaatttctgccccctccttcctgtatatacccagtgctggcctctgaggcagtccagctctgttttctcatgacacagtgattatttttggcattgcagatattttttctaatgttattacccagcccccttcttggttgccttttgtggagcaatcttttgggtaactccctgtaaatttgagggttaattttagttcggtgtggtagaggaggcagtgggagagaggaggaacgacttctactccgaagcgccccacccccaccttaagaggagccggagaggtcctctcacgccctgctcatgaaagagcttgctttcaccagctctgtgctcaccattcatcctttctgccggcgggcttgaggatatggatatccagaggtgacgctgggggctgcacctcggggatggcatcttaatgacttgacttggcgggtgttagaacagccccattcagagtgagttcactccctgcgcagttggctcactcggcctctgtccatagagttctcttgttcacgctgcaggaggaaatggagatttccaagtgggaaggagccttcccgatgctttaactcttcactgaagggaagaggagctgcagagagcgaaataaaatctaagccgccccagctgcagcgcctgggagaggagcaaggctgggctggggatggaggccaaggcagctgggatcactttttctttcctccttgagagggaaaggaaaagagcaaagggcatttttgattgtctttcacaatcagcaaatatttacccagtttgtctgccctagcccaggttccactgaaggatacacgaaagtggaagatgttgtgtctgtgcccttcccctggtacttacagcacagttataggagtagaacgtttgcatagaaaagccaccaagacagggaggcctttaataagggcctatgagtagtgtgggcaggaagtaccctggagaatgttgctaaggggccagggacactgctggaagaagtagggcttgggctggtcctaaggggtgggttttgaagaaataggaaggaataaaatgatacaggtagggaagacttgaaggaggagagggacattaatgtagggcttagtaaaatcccataaagaaagctacaaagagaacaggattcttcctggccagagagaagattggacttgttggactttacgtgcctcagattaggatggcagcaggcagcactaaccctgccagatggcatcttcagtctcaagatcgcacgtgttcctgggtctctttctactcaaagtgtgaggtcacagactagtagaatcagcatcctctgagggttgttaggaaggcagaatcccaggcttcagcccagatcctactgagcctgcactgtaacaagatccctgggtgattcctggccacagcaaaggttgggaagtgctgctctgggtgactccacaggcagctgtcagcagcactagttcagaccccagatttgattcacagaggtgacaaaacaccaacagacacacacaccttgagtgtccgcagggtgactcttcccagatggaaaccgtctattctaattaagagccgggttagaattcttaggaaagatctagaacagtgagcagctttgaggaatccacagaactgaagtcattgacgtggtttttatccgatgtctccagtttgtaccactttgtactactgatgctttagaggacaccaaaagaacaggtgtggggttctttccctgaagagtatgtggtctagttagggagacagaagccacagaagtgaaatcaaggagagcaacacagggccaaatcgtgcgtgtgtaacctctgaaatgggacttggaggagaagtcagtgcaggtgaggctttcctagggaaacggatgcatgggagatcttgaaatatgagcctaattcagacaggcctgggagatggagagagtatattccaggcagggagtgggaggggcagcagcagtagctaagtcccccctagagactgaagtggggcgggaaactgctccccacttgccccacggagtttgcttcatgccgaggaatccgttttacatctcaggccttttcttcttgattcaaccgccgtgcaatttctttgtcaattttcttagctgaaggcagtgttgtaggaacaggatggcagcacaggcagaagggtttgagccaaaccacagatggtgttgttggaagcttgtgagatccaaaggaagaaggctgctgatgggtagaagccctaaggaaaaaaatctaaatcagatctggtaacagcctgggtgtggggaaataccttcaagcccagagaggtggcaccaaagaaaacagtctggtgagaaggaaacaacctgtggcagctgtagactccgcaagcaaagcacaaaccttttttttttctttttcttttaaagacagacttctccaagctgagaactatcccaagggggctggtgtgccagctgaggggctggcctcaggcaaaatggtggccagcgtgtctcactttgctgcttcccagaccaagtgtatgtttcaaaaagctcatcagatttagtatcctagaaggcttcaccctcaagatgcccagctcagctaaatcttttgaacctgagggacttgcttattggccttgtagggaaggtcacccaattacaatcaagaatatgggatttagggtcaaatgatccaggtttgagtgctggctccatcactgggtgatggctgggcatgccactaacatccttggggtctgtctccttatgtgtaaaatgggagtgatacacctgctctgcaagattgattcaggattaaacagaagcaatatgctgagagttctttactaactggaaagagtcacatgtggttgtttcctagttatatagtcagtatctcagcttgcggaggttaattagtctcttagctgaaggctgcatggtgtcaggggtcgggcagtggcagacatcagaggccacagagagcaatggagagccacgcaaatgcctcctgcacccgctggctttctccctgctttttcatgagtgaagacagcaccgagtcttctctatacatccctgcagtggataagatgaggggtgggaaagatggaaagaacactttatttttacagtgggggaagaggtcctgctcatcagcaagggtggccctcttctcagaactggattagagtcaaaggaagccaccagttttagcacagctggtcttctcttcagatgctttgacctgcgtatgcatgaggaagagaagcagcctagagagagctggccatgggaaaaggaggctgagcctggttccaaggctgagactgttgcatgttctgtcttccttccctctgatactgccctctgaagcaccgtgacccatgctttgtgctcagtaatgctggctgtggtcctgaggatgccagtgtagccaaatctgccaactcagctttcatggggtgggggtggggtcactgtgaggtggctacggggagctggcagcaagctggatacatatcttttattgtaagaagtaagcaatacctgatgccaaggtagttgtcatggcattatttataacagctaaaaattagaaaccataacgaaaagcaataagggaatagtaaaatgcattgtggttcagccacatgatgtgatattgctggctattatgaatattttgaaagaattcttaatgggatatcctgttaagtaaaaagagcaaagtattaatttataaatccaatgagatctcagctcgttttcttcatacctttttgtatttttgaagttgcttatactaaatatgcattacccttatcttcaccacggcatttttaaaaaggaaattatgtgttgggaaaagctaggttatatgatggacagataatgaaggtctgtttctaatcgtgccacatggccagtgctgcttgtcagcaggcgctctgttcacagggccttgaaaaagccagaactcggggcttttgttccagttccacatactcccattacctttctaaacctcagtttttccttatctctaaaatgggaatgatggtagctgctcttcctagcctactgtgtgaaatttacaaatttagttacagatttccagattcactcacgagtgttttagactgtagtgtgtgatccaaatgtaaagtggtattattcactaatatgtagaataaagaatgccccactgtcttagcccatttgggcagctacaacaagataccgtaaactgagtggcttataaacaacagagtttcatttctcatggttctggatgctgggaagtccagtgtccaggtgccagcagattcagtgtctggtaagggcccactttctggttcatagctgtgtctccacatggtggaaggggtgagagggttcccctgggcctcctttgcgagtgcactaatcccattcatgaggacttcactgtcatgagttaatcacctcccaacggttccaccttcagataccatcacattgggagtggggatttcaacataagtattttgaggggacgtaaacattcagaccttggcacccactaaggcttgggcttgatgaagctaagcacagggacagttcattatgattattcctgtgtacacacagcttttcccagctgggctggggagtccacgtgtcctccggttacgtaaggagctgggttatctggagccccagatgggctgcttagtaatcgaatctgctgctcttttctacaaggctgcctggggctgagaaggccagaagataagtatctccagtcaacccaagcagaattgaccattagagggccatgctgggtgagccccagacattactgtcagcgctgaatgcagtccaggccctctgctccagggacacagaccgttagagtaggtcagagagctggaggctcagccccagcggagcggaggttgggaggctgaggtatgagatgctttccaggattcctctttcagggaagtggcaagtgaaagcatttgtccctgttttaaccactccagtctcatgtcttctctcttctttgtcccctcttgtagacttttgatatactagtgtggattattagtcttatctcccagatgggctgtggtctctttcaggatagagaccatgcccctcaggagaggtgtgtgtattaaagcatattaatgccttttttctcttgtcaaagtctgtctgatctggccagctcctcctgaatttgctaatttaatattttccattctgaatttgtaactttttgttgttttgctttgagatgggttctcactctgtcacctgagctggagtgcagtggtgcatggctcactgcagcctcgagctcccaggtcaagggatcctcctgcctcagcctcttgagtagctgggaccaccggtgtgtgccaccgtgcccagctaatttctaacttttttagagatggggtcttgctgtgttgcccagctggtctcaaactcctgggctcaagcaatcctcctgcctcagtctcccaaagtgctgtgattataggcatgagtcactgtgcctggcctattttctgttttcactatctaacattgatacctttcctccctttgtgatagattcccctactgatccctgcagcctttggacatcagaatgtacctagaacactgaccactggaacactgccttcatctcaaacatttttgtcactcctttggaatggccctcacagccaagaccattcttttcaataccttcaattgtggcaaagtcttatcttttgagggcacattttatcctatcaaacaaccacaatccatccacagctaagtctggtgactaacggggtgggtaaactggataatattgtttggggtttgaaatgaggtgtgtcctttgaagagttgtgactgattttcttatgtggctctgaagttaattctaaaagacttcccaaaagacagagcgatggccacctaccagcataaagttataggcttctcccaaggtggcttctttgaagggtagccaccttctgtgtggcatctatttcacatgtctcattattttcatctccctcttcctattagccatagcatctggtacagtggtgatcacaccaactcctagataaatgactgtttggcttatgatggtgacttcaaatttgctggacacagtgaatatggacacagtgcatggtagagggaaagagtgtggttaggttttggaagtggacctgggcgtcagtcttccatagacacatgatcacaggcctggaaatctatgttttcataagtcctccaggtgattctgatgcaagctaaaattgagacccacggctctgcaaaactggggccaataacactgcatcatttaagtgaggatcaaatgagaccatttattaaatgcatctggccccagtgctcaataaatatgtttccttttcatcctactctttgagaaaggtgacatagctgtttgcatctccaaaaacatttaagtccaaccccatctgcctccccccaccacacacacacccacccatccatccttcctttaaaaactggctgctttggaaccgtggtcctcagccctggctacacgtggggagcttttaaaactcccattgcccagcctgcacctgagacctattaaatctgaatctctggggatagagcccaggcatctgttttttaaggttcctctggtgactccagtgagcagcaaaactgagaaccaccgactttggttctgccccagttaagtatggggaccagtgactctttctcatctctggaacctggagctgggtgtgtttctcctatcaggcagcccctgtacagcagccacaagcctcatagaagtgtcactagacctctcccaattgcatttgacctttatttcctccattctcagcttcttgcaaattggctccagcttggaatttcaccaccaaccaatagactgatcccagctggcttaattagcctcagtcatctctttacctgctgaaatccattctgtttctaagccatttaaccttatagggtaataggcatattgttttgatacctgaatggccacaggcattaggcatgtgagtcctaatcactctaaaagtctagctaattaggcagccaacccctctgtgttactggtgacagacatcttggggcctcactccaggctgtgttcatatggaagtcaggaaccaagatcatcttgaccaagagcagatcatccttagattcatgacctaagtagcgatccctaagccatgctcggagcaatgacctaaaagttaagatgtttttaagataacgaagctctgggcaaagaggtttttcctggatgaactgtagcatatctctgctgacaatttttggacatttcagttttgttttatcttttgactggctgcctggtgcttaagtggttgttaactttagctgggatcaaacgtttcagaatgtgagtttccacctcggggagagtaactataaatttgtgcatatgaaaatgtccagggggaaaaaaaacaaacccaaaacaaacccaaaacaaaaagaaacacctttttctccacctgcggcatagatagatactgtggcagggttggacctgctgcttttatggaacactgcagagccacatctgataacattcccccaccctcccagcactactgtgaccggcacctgtgtctgctaaggcccacagcacttagtcccttcttcccccgccgaccccatctgaactctgatgctggttcttagtcctactcttaacattccaggtgttctcctaaggtgaatgggtgcacacttaaagacatgaggctcccctcatgaaatttttgtcactgtatttaaaaaagtattagcccttcttcccaaagtatgtgtgagcatccaggttgtgggaaagtatcaacacagcacagggaacatcaaagttgtacagtaaatgatagtctccttgctgccaatggaaaaacttttgatcttggacccagaagaactaggtttgagacaatgtttttagcaaattatttaatctctctaaatctccacatcctcatctattaaatggagatgatagtttctatctctcagggttgtgagaatcaaatgagataacacatgttaagaagaagtgctttctgtaaaggcattattatttgtccttttaggttcagctgaaatcccacctccctgacttttgaaccaagaggctgcctaagattctcaatcttcctttttctggaagctaaggtgttgctgtttctttatttcttgccaaagccactatctcctacagttaagcagtgaaaagagtattcgcctaggaagagcagggttctagccctagctctgccactgattagctgggttgctctaggcaagtaacttacctgctcaagtgtctgtttccagatctgtgaaaggggaacagtgacagtacctgtcttgcctacctcacttggttgcaaggatggaattagatagggatcccctgtgtgtttccggacttctaagtgtctgctcactgactataaacccttaaatggcttatgtaggcattggctttgtgacattgggcaaatgacatattatttctgagcgtcagtttccacatctctaaactgtgtaaacaatacctactttattttgttgttaggaagagtataatgaactaatatatgaaaggtttttgatagagcaccaggcacaaaaagcacagcaagactcatatatcagatgccattgtcagagcattgactccagattgccttttccctacctggcttttcctctctgcctcttcttcgaggaaggggccaatggcagagggaagctttgtgcatgcagatattggcgttaatgccatagcctgtgctgggattgcttttgcttcaggatggcttcccttggcccctgatgacgaggttatgtgttgatgatgcttttgttggagagcacaagggttagtaatgaaatccagcatctttcacctgaccctcctgatccaaaggcatgatgtgtgcggtttcagcatcctgccctcttcccatcttcctttcctgtgccagaatacttgcaattctttaactttttctccacaatcaggtcaggattaaaatgcacgtgggagggactaatataaaaactgccactaaaggtctaatcagggcaagtcctgagaaggtggggaaaggggggtgcaggggtaggtgtcctgaaggttggaagtcagggagagagggaaacagggattagataaaggaagcagagaagggagacatgacgagaaaaatagtttcactcatttcacaatttttctgaaggttcttcttgaccatcaacagctgttggacgattcatcctttaatccgagtatatgatgcttaatccatccacggagctggatagtctgtctttttaaatgaagtatgttgtaaaatcaaaacagtgcttctgccccaaatcttgagggatttgagaggcatgctcacattccatgaatcccaaaatacagattttctgtccaaatagcaggctgcaaagccaaacaaaaggagaagcagcctctgggatctcagatggcaggacagaacgagccagctagagctgattggattgaggccttgaaacctatgaacttcgctggatgcttttttattttatcttatttatatttttatagagacagggtctcactatattgcccgggctggtcttgaactcctgggcccaggtgattctcccatctgggactacaggtccaaatactaccatgcctggcttagatgctttttaaaaaaataaaaaacatacttgtttcttcattaaatacgcaatataggttatttatagaaacacaagaaaatacagataagcattacaaagcaaaacaaaaaccaaaaaaactccctttaacctcactaccatgcaactgctaacatttttgagtagaaggagacaggacagtcattggtggttaagtgccatgattctggggcccaccttcccagtgcaaagcccgacttccccatttacctgctggaggccacaggtaaattacttggcctctatggggcagtttcctcatatgtaaattaggtataataataataataataatgcctacttccaagggcagttgtgtgagtttaaataagccaaggtagtactgcttaaaacagtccttgtaagcactatgtctgtgatacctataataatagttattatgcatctagcctttctcctatataatttataggaagtattatgtataatacatttctgtgaaaatagaattgtcctgtactgttttgtaactttttaactcttatgattgtcttttcatggccatctttttaattagtattagctaacattgattgcttacagttggaacaggcttagtgctaaagattttacataaattatcacatttagtcctcacagttaactctgtagggtaagcactattgttaccattttacagatgaggagactgaggctaagcagtttaaatgatttatttacagagctaacaagcagagaagttagaactccaatctaaacattctggcttttaaatattgcccgtgctagaacttgccatggactttataagaaagtccaggatttctttaggacttctaaaagaggcaggcttcagtgcgtgtcatctttcgttccatcctgcagcaaagaggagaatgaggctgagacagcctggcaacctatgctggcagggcttagagagaaaatgtttgtgcccactcctttttaatccttgacagaacgcacgttggtactctagactgttgggtgtctggctaactgttctggggctgtaatggcattttcagtttttactgtggaaatcactttctggtatgaagcgggatctagggttcagtactactcttaattttttctgattgtgtcttatgcagaaaaagaaccttaaagcagtttttttatcttgttctccagagcccttgacaaagccatctgagccactgatcatagcttccttacccttctctttccatccctggacattcacccctatccccagatattccagggctaggtcccaggcattggtagttaatttaatcagccagtctttgcccagactccacccatgtgaagccctgttctggcctccacagggaatgcaagaggaggactttggttgtgaagacaccaacacacacaaaagcagagctaacaatacaaagcaggttgtgtgtggctcagacaactggtgtgagcccagatcagtctagtaagggagtgtggctgcactgggggttggggccatggggatgtcctggccagaggtatgataggctgacagtaacctttccgggactaaccccttcttctccacttaggagtagctcggagaggaggaaggagaagtcccgggatgctgcgcggtgccggcggagcaaggagacggaggtgttctatgagctggcccatgagctgcctctgccccacagtgtgagctcccatctggacaaggcctccatcatgcgactggcaatcagcttcctgcgaacacacaagctcctctcctcaggtaaggccagcaggctcccctaggctgggcagatgccagccttaccagcatgttcctatatgcaggggacccttctgctgccagagctggaaagtcaccccactacagaactttcacccacagaaacaccatcatgagtgatttattccttcatgttaaacatctctcttccagcagtgacctttaccgtgaatccagctgtgagaggagggcagggacaggaccagggaagaacatgggcacccagaggctgtggagaacacgggctgggagaaccaaggacggcttttgctgacttctcaatttgttgccatctggccataagacccatcctccacactagattgagtccgcaggaagcattctaatccttaacttccagtgccttctccagaacagcaagaaggtgtgcccggatgatcttttccctctgagaagccagttaggccaagtaaatcatttagtctctctgaacattggtttcctcgtgtataaaatggggttaaacatacttcttgcccagggtgtcggtgagaatggactgaaatgatgtccataaagcacctggcctggctgagctcactcacactggggagtccttgacatcacccctccctcggaaaataactggttctcccctccctagcacctctgcaactccaaagttcacaagacatttgctttttctcagttacattcttcaagaaaccatttcctatgcgtcctgaccagaaacaggtgtcttgagtagtcttctggtttcagatcctaggtgacattctcgtcaggggtgtcagttctgtaaggacgctgggcaacgagttgtgctcctccccacctggtctggtgccacaggtggggacagtgtctgacgggtgagcatgagggaggcactcagggagggaaggttcttttgtggttgtttttcagttttccggagtaagcctggtgccttggagacggtggactccgccatcctgttatgaagtggctattctgggaaagagggaatccagtgtgaggctgggaggccagaccagaatgtactattctggtccctgtagtacaggaaggatatgggggacagactttcagaaaataggacgacagctcagtgggcctggggttggagggctaggcctaaagaggcgaaatgtgcagacaagagcaggagagccaagggggaagatatgctccataaatactttcaaagaacaatgcaagacaatggcagatacatgatcctagatgctgcaaagagagaacagtgggctgagccctggcaaggcttggattgctggatataagaaaggctgggagactccatcacagggcatttgtgtacccctccctttaaaaaggcttgtcttactggataactgagggccaagttggctaatgttgcaatcatctttacataaaaagagtagacagtggaggatttaatgactggatggaggccccttccccacagtgagaaccctctcccctgctttcctgctgtggtacttgagattttgctcttagacattaattcctttggattaatcattgcttctttcatcaccactcccaattcctccacccacacaaagccccagaaggggtaatacaggttgagtatcccttatccgaaatgcttgggagcagaagtgcttttgattttttaattttttcagattttggaatgcttgcattgtatttatcagttgagcatccctaacccaaaaatctgaaatttgaaatggtccaatgagcatttcctttgaatgttgtgttggattttggagcatttcagatttcaggttttcagattagggacagtcaacctgtatattaattgtagaatgcctctgactaaatttggactcgttgtgtttctccttatttcacagataagtgaagcacagacaggttaagattgctcaaagtcacacatttagcacatggtgaacctgcacctggaattcaagtccttttgaattttggtccatgggaaaacagacatgggacagcaagagcattttgtaaacctggtcaggcaaagatgctgacaagggctggggtatggggtgtgggggaagggagaaggtaggggaacaaaggtcaacagaagcagctgggggccagcgtgatggggaggaggtcctcacacattcagagagttgtcctgtccttccccctagtgcagggcttcgttttgcatgcttgccctcctgagcctggctgtccatctcagtggttcaaaggttggcctcgaaaaggccacgagttaggctggactccctgagcacatctacctgtgtgtgttctggtgtgagccctcatgtgctgatgggaacccctgtgtgctaaacacacccacagagataggaccagagtggccacagtgggacatcccatatctatcccatctccggagcctgttgaaagttgtggacacaaacttgcctgccctctggctgggctcggccctagaccagctagagcctttagcctgtcagctctggtcctctctgtcccaaggaaagaaatgaaggaaaaggataaaaagtttctacttttggccatgtggtcctgatgtccttgaaggagaaattctcaccaaacgagcacagcccagggaggaggagatggtttctcagcacccgcttttctctgacttctctcccaggctcctgccacacattcgctagactgattgttaagttattttcagaaattgtaagacaagatctttttctttctaaatcgtattttgcttttccaacacatgtagcgttatgaagaggagtacgggatttgtgggcagatagacctgcattggaatcttagtttggctgccttctttctctgcaatgtagtaaaaatttctctttgagctttagtttcctcatctgcacaaagggaataatggtgcttaccctgcaatgttatttggggattgagataacagatataaaaggccttatcctctagcctgccacatattaagctctcaataagttatagcttagaaataaaaattattatgaacaaatatattgatttatattaaatataggcttctggagaaatgatgtaaaagaaaacccagtgtaaattcttactatcctctaacctactttctagcaatttctatcaaaatgcagagtcgtcaaacttttccaaggcaaaacaacccacacattcattatttaagcatttctaacaaaggtgagtaccaattttggctcactttataataggaaatagctggttgcatacctcaaagttcaaaaggctaaaaaataccaggtttttctttagaaaagtttctctttacttagtaacacgtttccctttgattttcacagtaggctgttctgtgtgggaatgttggagaggaaacctcaacgttgagaaattcaggctgtgggtctgggctgccgattgagattcgtatcacaggaagcaaactgaaacaatagctttatgatattagctgccacgctgggctgaggacagaacacactcttacaggaacatcggtggaaatgccacttgattgtcctaaatcctctttcaagatgagccccacaaaccatgagcgaatcagggtcaactctgcattctgagggcattaaaccgcagtgaatatacaaaatttgcttttcattgtaaaactgaattttgggcttgcccaaactcatacatggcgaaatcaaattcattttccatggacctggagatcagcgtgaagcaaggtttctaaagagaagtgtcagttgcattatggattcatcatcatttgcttagcgaagacatcagttataacaagagattatattttcctgatctctagactactaagggaaggatattaaaatgtgagacaagtgattttaaagtttttaaggcttgatatgacctttccatgcaggaaaagtgggacaaagaaagaattgtggaggcagatatatgttctggtaccctctcacaccccactttcagacttcttttcccaggctttcactcctacctccacccctttgtcccacccactccaaatcaaggcctttttctgtcctgtttggaaagaactcaataagctgattcatgtgaggatgttaatgggtgagaacagctaatatacagtctcttctagagatactgactttgttcagatcattcctttaacttaaactaaaaagtctcgtcagtcaacaggtgtttgctgaacccagtcctgtactacatcaagggtaatacagagaggcaagataggatagtaagatacatgcaaagaacaaaggcatgaatctctcctagtggactttcaggactctcagggagcccaggaagatcaggaaggacacagtgccttctgtcaaaggcatcagaggagcccaggcctgctaatggtggcatttaaaggtatggctaaggatccagtaagcgatcccagagtgatttccctgtggcttgactggcactgctcttgcagtctgcacatccgggagggcggggtttgaggggccaggctgtgggtcaggtggaggggaggaatcagtttaggcagagccttagaaggaaggcccctgtggtggtcacaaagtggtaactgccaagcacatctgaaccaggaagaccccatcagaatggctttaagaacagtcagagcagtcctggaacttctcggagtaggaaacaagaggcaaagcgaccttggtggaataaaagtgcagccagcattctgaccagcagcaccgtggggcagcctggtctctgagaccactcaggagcctctgctctgccactctgcctgctctctcccaatgcacagcccctgctgcccaggaagtcccaccccacatgggcggtgctgcctgaaggaaatgagcgttgctccggaaaaagtgctccaaaacctcagcccgcgcatatcctggctgtggggagtcatcaaagcctgtttaccggggctatttttagcattaaagaatcttgttatgctccccaggacgggcatgcactttctcagcagagcacctctggttttaatgagccatctctcgtctttggggtcagaccctgaagggtcctcggaagcaagtaactgagatctggagcccaggatgatttacagacccacttggtggcttattgagcacctactctgggctcctcactttgttctgaccaagagttgatgctggattgtggcatcaccttacagcagtttatctgtcttccccaccagtctgtcgattccgagggaaggaactgcccttacacctttcagtatccctgattctccttaagacaggactgagcacacagtaagtgacacttctggacagattaccttgtgcctagcataaagcagacatgaacacagtagaaacttaataatggtgtagggagcgcgtgcattttcccatgtccgtaacactgagtaggatattaatggtacgtcagggaagacacgatgttcataggggaagaggcagaagggtcttcagcagatttgtgacatgagcctccacggtgaggggctacctcctggctccccagttttcactctcagctccaagctgggagtgacctggccaggttccttcagaagctcccaggagaacaagcaggtgctgtgagggcaactagttccacagagggaagagaccctgtcccggccctgccgtcacagggtccctggggccaacctgctggcttcctggtcctccagccattgtgaccgcagtcccaagacattctgttacccttcgtggccctagattgcccctctccctcccggaggccagctgacccgatgctgctgtagccgatttcgccacctcctggaagcaaatgcactgggcatgggtggaaaccagtttggctgtgttggaactgttaaaaacaggaaattttaagcaggactatttcctctgggactagttaacccaaatagggttgtcttgggattacttcagattttgaagtcagcgttaccactgagatcaaagaaattgaagagaaaatatcttctcggttggctagaaaccacagggttggcctctgtgtatctacagaaggtggtcacctatctggtgtgattgaagtggcgctgaaaacctctcctcactcatctccaaaataagtcaccacctgccagcacagggtaattaaggtcactcgtaggatctttgagttgaggccatagctctcagcatgtggtcctatgagtagcagggtcagcgtcacctgggaactttttagaaaaacagattctcagttctactgaaccaggaacccagcaggggcccgtccagggccagcttcatgggcgtgcagcacaggcagtcttagagggcgccacacttagaaagttctcaggcttggtttaatttttccaatgagaggtctcacatttttattttgcactgggccacgcaaattatgtagcagtgctggtctcagaaatgtttctttcagcctggcctatagatgattctgatgcatactcaaatttgaaagcactgagttaagtcattttctcccctaaagcccctgttcaaatgaagattttagctgggaaagctaacattcacagtggcatcgcccacacctgggacattgcatcatcgcttcagcgggctgatgagctggcagagaacaggtgtatcagcagaaaccccaagcagggatcaggtgtgcgtatgtgtatggtgtaaggtcattcccatgacctgtggttctcccctctccaggctagccgcctgaaccagggtgtgcagaggaaagaatttcccttgtttcaccattttagcagaacagagggaaagccaccggggcattactctgtacaacccaactcttggctctgaagccttgcccatccccggacaggacccactgtgatcctctgcaaaaggcatctgtgactctggcgtgttctctgatcctgtgtcctgaaagatagctggtcccctttgccttcactgaagcctcttggtaggaagatcttgtaatgtggatttgttcttcttgaggaataacagcaggtaacccaaagcttaaatttagaggctccaggaaaaagataaaagagaaacccagttcccttgcagaaaggcccttgaacgacatttcacagcattgatgtgtccctggccaagtggcccataaattgaattgcattctacattccttagaatagtctccatttggaagactccttttagttcagtgaatgttaatgtttgcaactgacatattactctcatccacttgttctgtaaatcaagtgaggcatattttgattgatgtttgcactggataaatacaaattttcataagtaaatgtctttggagttaaataatgaactaggagaagagggctgaaataaagtctgtggtttgtgtataacaaccaaaggcctggggcctaagaggtttcttttggtctgggacaagagccgagtctatatttttcagatagcagaggtatactagatagggcaggatactcaaagtgtgggtggttccgggtggaagttttcctaggctgcacccagcaaccacctgtacggcctgctgagaatgcagttgcctgctcactctgttttgcacctctgggcttcactctctccaaaccattctgtacgccattgccagactaatctccccaaagcagtgctttgagatgcactcctctgatcacatttgcttgacatgtgaggcccctccaggacactgggcctgcctcaccagcccaatctctgagactgggaaatggattctcttcttcagccagatgggcctctcttcagtcctaggactgaagcttgctccaggtgttttccagtgttcacacaatcccgtctggttcagaaggcccttcttgcattccacagagtgaaatctgttttttctaagactcttcaaatcttctttgcaacagttagttgtctgtgatcaccccaaagcgaccccctcgtcctctgaccccttagagctcttcccatctacacttttccttgggagcccagctatgacacccttgaacttttatttagctttgcatctctgagtgctacatattcctcacctgggatctgagcaatttgagggtagtgcatgtcttggagcagaaagaagaaagaatttactgttcttatagttttaggcactttacgtacttatccttacaattcagagatggaaattgttattcccatttagctgatgaggaaagtgatatccaaagaggttgttacttatccagagtcatagcctaataggaggctgatctaggaatagaacctgtgtttaactccaaagcctatgaatggttgagtgtggcttctggattcagctgtcaaagcttgctagctttgcaatctttatacctttggacaaatggcttaacctctctacacttcatctgtaaaatgagattaagaatagtagctacctcgtcggtcactgtgaagattacatagcatgcttagtgcagtacctttcatgtagtaattgcagtatatattagcagctaaaatttgttcctactactacgactaccattatattcaggcatactttgattgatgtttgcactggataaatacagattttcataagtaaatgtctttggagataaataatgaactaggagaagagggctagagggctgaaataaagtctatggtctgtgtataacagccaaaggcctggggcctaaaaggtttttgtggtctgggacaagagctgagtctataggctgtacaggtggttgctgggggcagcttgggaaaacttccaccctgaaccactcacacagcagctcctactgctctcattactagtgccagaagtactgttgtcacaacaagcacactgtcctcacagctcccgtcagggtgtcctctgtgcagtggtgcctgctgccaggcggaggcagacattcagatggttggcagtatgcgtttccagaaaagtccacccaatgcctttgcaccatccctggcaaatgcctatctgtgccagtcccatctgttttcactccacattcatgcaagctgtcccacccccccccctttccagtttgctctgaaaacgagtccgaagccgaagctgaccagcagatggacaacttgtacctgaaagccttggagggtttcattgccgtggtgacccaagatggcgacatgatctttctgtcagaaaacatcagcaagttcatgggacttacacaggtgacaccctcctctatctctttcaaaagaagaaatgtttccatttgggggtagaaatgagtggaaggtgctagccacaatcccacttgacctctccctgcaaatgcccacggtgaccctcgctgacctcaggccacacgcctcaggccacgctcccacccccaagcattgggtttggctttgctcatgtccatcctggtagacagctctctactgactcattaacagaccaagtctctgtcatcatcagtagtccccgattacatctttctgtctgtggacctgacactggactgggattatgagaaaacccaattcagtctcctccctgcctccaaatctggaaggtggctcagcttactcttggagtcttttacttcactgttaggaataatgatgcctaaccttgtttttgaaacaggtggagctaacaggacatagtatctttgacttcactcatccctgcgaccatgaggagattcgtgagaacctgagtctcaaaaatggtatccttaattgtgtttacttccttcttgcccccactgggtgggaatctgcctcccctttgtctacgggtataagggagatagctcatggcccttgtgatgcaggaaaaatggatgtccttaaaaaatttaagtatgtagcctgtgagatgagattggggcattgagaggatccagtactcagaaatatctcctgctggccctgcatggtgcctggtgtcccactactaggggacacctttgggttaggacactgtctctaggaggtttcatcacccaagagtcaagcatctctgccaaatgacaccacccaaaccaatgaggaactagtctgtgccaaagtgctcatagtaactactgtagttatctattgctgtctaacaaaccacctataacatagggctttgatgattatctcccagggttctgtgggttcagtgggtgggtcttgtactccatgtgatgtcagctgggctgcagtcatctgggggccagactaggctggggtgatcaggatagctcacacacgtctgggaccttgtggcaggtggctggaaccctggactcagttggcatgctgggacaacaggactgttctctcactctatggagactcagagactctccctctccatatggtgtctctagggtagccagacatcttacgtggcagtttagggctcccagaagcactaaagtggaagctgccaggccttctgaaggctttgtccccagattggcagagcatcacttctgccccatcttgttggttagagcatgttacaggccagccctggctcattgtgggaggaaactacacgaagccatgagtgtcaaaaggcatggcttgttggagctacttttggagaagagctaccacaggaaatggtaccctgatgagacgcaggtcaagtaggttttgatggagaagaggtttaaaaagatgtagcattcaggaccttacccatggggatacccagcaggtgccagtagatgagaggacccacacaggcagaaagcacgttgcaatggttgcaatggcagtggagcttcctgtcttgtaactgtggccattcaacaaaggcatgaatagggacattgttaagaggactgaagctttggtcagaattggggcttaatgactgtcaaggtcccttccaaacctgagattctgtcactggtctggggagattctgtgcatgtctagatgtcctctttaacaacctcacctgtcactgccatggggcttgtgcttgtccagcctgaataacagaggcagtgaggctaagcctacaaggtttggctcttattaccacacacgctgcaaaaacagacacttcattggctcacctccaccctattacagactgagtctgcagtccacatttgggcctgcaaagtacagaatcacaaccacctcctcttctaccactgccacagctccctcacccagctcctctgctctctcttctgcaggccttagaccacctgggtcctagggtacactggcagagagcaccctgtaggctgctcagtgtcttgtctggttctgtggggaaagggctaccagactttctaaagctctctaaaaagaggattcatgttctgcatgggtaggtgcttgaagcctgagaaagcctgagaaaaccaaagactgatttcttctgtactccagaaaccctttggcctttgggttcttagtgtcagttcagccactgaccatagtctgagtttgagtctgtgaccagaagcaagtaccctacttctctgttcctcagagtctttcttttcaaattgatggtattggactaggcaaaggcgacaacctttcagttctcaagtgccatgattcacagccaagtgacctctaattatctgagtagaactttagatctcttgatctgcatattgaggacttgggatcagtcaaactcaatgcaacagcaaatcttcactgaaggtgccagcctatgggtggactcgtgatctagacctaaagggttagtgtgagttcctagaggaaaagaaagccatgaggcagattgtggaaggctttgaaggccaggtggagggccttgaactttattccatagacaatggggagctattgaaggtttctgtgcaggggtggagtgatctgtgtggagcagtgtttagaaagaatgaacaaggccaggcacggtggctcacgcctgtaatcccaggactttcggaggccaaggtgggtggatcacgagatcaagagatcgagaccatcctggccaacatggtgaaaccccatctctaccaaaaatacaaaaattagctgggcgtggtggcgcgtgcctgtagtcccagctacttgggaggctgaggcaggagaatcacttgaacccaggaggcagaggttgcagtgagccaagatcacgccactgcactccagcctggcgacagagcaagattctgtctcaaaaaaaaaaaaaaaaaaaaaaaagatcaaatgtcagcatggggagaatccagaggttagcaagttaagaggcctcaataataccccagcaacagccacaaatgaatccctccagcccccttatacccaacaactggtctggtcctggtggtggggccagatcccaagatacaggtatatctcattgtatgctaaccccacctctgaaaattaaaatggcaagaatcataatttggtatgggagaaatggttttataatcgtgatgaaggaatgttctctcttttttaaaaaaattcactattcagtctgttactgagtggggtcccctaaggatgttgaagttttgttcaagggtgccacagttcctttgacacataactcttcaggaatatgtcagtcaagatcctctggaagtttaagtgcaggggctggtgactgttcctggaggaaggagtgtgactattcgaaacaaggctctagattgttctatgatgctgggtagggggcaggattatatctttgaaagtaggtaccagagatggtggtgtaggcaggatttagacacagacaagtgggattcagctggcactcttcattactttgttttacaaaaagtggaaaatggttctgaatcgggaggctgtttggcaactataaggaagtaagctatattgctggtcttggtgatttaatttttgctgagagagaggatatgatccaggttgagttaatccataaagtggacttgctcaccaagtccactgtaaggagattcgtaccagagttctctctagagccttgatacatatgtcacttcagggacaaagctaatggcatggtatcctgaacacagctattgcagtttgcaaatggggtacaggaggggttaaattcctcctgagagacaggttataaaggaaagacgggagtgtcggagagacatttctaacctgtgaggaaggcttacacccttggagtaactgtggcctcactcagactgtcccttggaatttctgcgagaagacctgggcctgccccaggaaagggtggctgagttagtggctgataggcagtcgttgtgtcgctgctctgaaggcaccactgaccatgttccagatgcaatgggaaatcaaatgatggagcagctcctcccttgtgggagtttatgctccagttgaggagataagcttgagagtgggaaccattagttcacaggccatgatggagctcagtgttgatggcagaccacaggtgctaagagagcagatatttggaaaatataaacaataggctgccaagaaaaactgcagctgggcccctctcatgaatatccatataaaactgacttcagctggttcttcccatccttccacatccaggctctggttttgggaaaaaaagcaaagacatgtccacagagcgggacttcttcatgaggatgaagtgcacggtcaccaacagaggccgtactgtcaacctcaagtcagccacctggaaggtagggcaacatcaggcctgggttggagtcccaggtgtagggtaacggcggtgcaggggatgcctaaggccctacccccacccccagcactctcggctccatgtctgacccttccacgcctgtctcaggtcttgcactgcacgggccaggtgaaagtctacaacaactgccctcctcacaatagtctgtgtggctacaaggagcccctgctgtcctgcctcatcatcatgtgtgaaccaatccagcacccatcccacatggacatccccctggatagcaagaccttcctgagccgccacagcatggacatgaagttcacctactgtgatgacaggtagggggccatgggtgtgtatgctgtgggcagagatgggtcttacctgtgtgtgtggggagttgtgcctgtattaaaggtgtggaactgaacatagacgtggtattgccgggtgcatgttcgtggacctgtgccactgtttcattgcatcagtgcccctcagaggttcccggtactgtatttggtggtctcccattgacagagcctcagggtccatctgcagagctttcctggtgtgcaactcttctcatcattgtggtgtgaacatatttctccatacgtgtatcaggctcctgaggaaattctcaaggcagtcttctgccccaggagaaagagtctagagacttccatctgtactcctgcttcagaggccagtaaggagcatcagcttctgccctggagactgaccctcttccattactgactgagcctttccctccgccttgttccttcctgcatgcaactccattccggccagtgtccagccattttgaagaagatgaaggtagctgagccagatgctaaccccccagtgccaggcccagtgtctcttaggagacacagtagtgattaagagcatgggcttcaggactagatggcttaggttcaaatttagtaataaatgttcagtgttagctcttattatcacctttattagagttgttgaaagagtgcctaagactgcttaggcatgtcatgccatctcgggttcttagctcatttagaagattgaagcaggtggggaagagactggggttgtcataggagggagtatttagataccctacagctcctaactcccccaccagccctgcctctgggactgtggagcctgatgatgggaggtaggaggaggaagatggggagaacagatgcccggagcaatggccggccccagggagggaaggaaatgcagaagactgggcccagggtaggcctggcttgagtaagcgccactggggcttgctgagcagcaccccccgcatgcgcccttcctggcagagatctccctgcctgacctcagctttctgcagcatctagagccgccatgtgtcccagggtgacagttcctgtggcagctctttgccacccccaactctttgccactcttctctcatcttctagggtttctcctcaggaaaccctcagatctcagtttccccttctccaaaatagagataacactttctaacctgtttcatggggtcactgtaaaatgagataatggctgtgcaagcactttgagaagtccagacaccacaacacatgtgaggcttcttgttattgcttatatcttacttcctgtccttggcctcctccaaagcaaaatcttccactaaactcaaggagctgaaaccacttctgaaggcagttagtggctggggggcaggaagaggaagaatctgacccccagatcagcaagaatctgccttgtcttcctcagctagcaggaaaccatggaaccccaggaaaaaaagctcctgctcagcctcccctaggcctacccacttttctcttatcagctggacatcccaagggcatctggtttcttcatgggagggaccctcctctccaggatggggtttctctcctctgattccagaccggcctggtgttggttggtcgccccttcttagagttggccaccacttgtggcacaatttcagaacttttgtaaaagtatccttgagtcattcctgtccttcagttctgaccacagtagggccaggattcacagcctttggagctagtgggtagttatataagtagaaagaaatgctctaacctcatagggagaaaatgtcatgcatgaagccttccgtcctggaacttcgacacagtcaccatttattgtaattgttagtggtggtggtggtggtggtggtagtggtggtggtggtggtggtggtggtggtggtggtggtggtgataatgatggtggttcaagaagaagattgcacttttagtgacaggcactgcaggaatccatgttataggtaaggttatttatcagatgcagtctttgtattcaggtgaacattctgggcagaagacacagctttgtgtacctcagtagtcttgtgagataacatggacaatcccactgcatagcccctgtgtcactggctttgaggtgaagtggctcaagccgacgtagccatatagcctgggagcatatatagtgctggggatgatgaaagtcagatacgtgcttcaccctggtgaatgaagcacatccgtaacataactccataagcactgggaaaaccctactgtcctagaaaataacttggcatccctacataatagaaaagagattttttttaagcttaagattttgatccttgttacagtgagaagaaatcctctggaaggggtaattcagccttatcctttattcattatcttggtttaaatgagtttcaggtaattttctgaaggtactaacctttggacaaaagaagagggggagaaacacaaggaattggatgtctaaatgtggctggagaggaaatgtacatagaaaggggaaagatgctgtgctgacttcttagtttggctcagggctggtagccagagtagcttctggcttaaaggaagtatcaagcctcgtgatttagggctttgtgactcataatgtagagggtgatattgcttataagttctgcgagacacactgcattttcagcaaaatcttgcctttcaagaaacctaattacatggccccaagtctgaattcagtggtgctggagagctgcatgtagaagcatttaaagacatagaatgctgtgtcacacagaagttgtgtttaaccgattagcagattagttaacaagggcacagacatggcttagacagttgatgaagtgactattttaagtccttaatccctaagtgttatatcttaattgctttgatgaggcctgagatatttttggttttggtagcttgttttgttttcactctttgtggtgggatggggagaagcatatgcacatgcacacatatatacactctccgcctcaattcccctttagagacaaatcctgcaaaaaccaatgcctgtccaagatacctaatggggtgaggggttctccattttaatcaggaaattcactaggtttaatgacatctgagacacacaaggtgctgtgattcccacaaaggggattgttttcctacaagaaaagttagaatctgaagaaaatgtatggcagttagaatccacaaaatcaattttgaagcagtttggtacttgtcttatatatactgagaccacagacacaatcaagcaaaaaaagaaaaagggtcatggagaaaaagatgaaaaccgacaggaaagaagggagagaaaagacaactctaattttacattgaactctcaggtcaaatcagttgaatctgaaacaacctattctgaaacatctgaaatagaataaaggaatacagatggttcaaaatgcatttgtcctcctgttaatgagggatcagagtaccatattaagtcctgcattaattgtttttaaaatagtaaatacttttaaaagtaaatttcataacaattcatgtcggtcacatttatgtacctatggtcaactgctctagacaaggggagcaagttgagtagcagggtaaaagaaaaatatcctgattattaatggaattaatgatctcttcttcatttacgactcaaacataggcaatatactctgtttcccgaaatactgagcaaccagttacgaactgtcatttactgtgcatctgctatgtaactgtgtgccagagaccattacatcaaagtaaaagagatgattcctgatcttcaggagttgagagtttgagacataagccatttaatgaaaccacagtgaatggtacaaaatacaacattccatttacccaaaaggaagacaaaagttgttcccaagtagtttaactttaaaatagggtggttcttaaattcatgtggaggtgccatctagtggtgaaagaggtaactgtgaaggaagccaagccgtcagggagatagaggccaggcctttctaattatcatataatcccactgcgattttgtcagttgtaggagtcttcctgtatcttagaaataaattataaaaccaaattatgtggataggagcagtatcaccaggggaagaggtttcaaaattacagtaaaaatttcaaatcaacaaagagggtcatacaatttttacaggtaaagaactttagggcaaccctgttttgtcattgcatttagggaacataggacatattaatatcaggagttacagttgaataaagatgcctacattccaagttctgtggataaatttatggtgaattgtttttctacaaagaagttgagaataagtaaaaatggtgaaagtgagggaaacgttgaggatcctaaagataatgtcagtaaggagaactataaagagccataagtggtaaaacacacacacaaccttcctatgtatactcttacccctacaggtaccctgtaacactccacagacaggatagaaatggatttcccgttaattacagagctggttgtatagatttcatataaccatgtagtatttgaggaaaacacaaggcttaagtactgtttaaagcaaacaaaatctagatgaaaatatattaaaaccaaccgaaggcactgaaatctgagttagtgaacagcgtacatattagtaaggaaacgcagtgtcaaagcttataagcacatatagaaaccaaaatgagataaatcacggggtgctgaggagaggcgatgggcagagtgtggaaggaaagcaagccgacttgaagtatttattagcagatacattctttggaaaacaaataggtggttacaaagtacttaaaactttcatcctcttaaacagtttaaatactctctcaccatcttgcttacatgattaatttacctagcaaatcctttactcgtgtagggaacaggggtaaaaactgcagccagatcttgcgtgactccaggcggtggcatctgaagtcaggcaccgtggcgctgcaccgcacgtggacgggtgctggcgattacatgcggggaagaagagcgagccttctcaggcctgtgggtggatttctttctgccacttgaggtggcagcactcacgctgtagccaagagaataatttttttgcgagcactctgctgtaggtggtgtattttgaatagagcttctaaacagttttgagagtaaagagcaatgaatcattcattttacattttgaaggcacatctcactctgaagtccagtgctcagagagctgacccacgtatttacttggggtaacaccaacttcagaatttaacaaccccctttaaagctgtattttctatttcctttcatccttcctctgcctccttgtggctgactatctatctgcatctctctcctcactgcatccttggtctgctgttttttgactttattattaaaaagtatcctctgttcttatgtttgaaatctggtgaattaagtccttgtacatttctctcttctcttagaacagccctactgagttgactttgaaatttacgggtgacctcaaactgattttctttttcccagtgagtcaggggtccttaattagaaagaaagaaaaaaaaatagttccctggcccctgatggagagagcagatgaacttgtgttatcacagcccagctcggaaggcttgtctggagcctgggggaaatgagcggggaaggcccttgtgtgccgtaggagcgaccttataaacaagctcggttcattaacctccccactggcgtctacgtgcctgcacgtgggggcgaatgaccatgagctttaagttggggtttcctggctttgtgaagtttgacaactcaaatgttcttcaattgtgtttgggatgtggtgtatttcccagtttttatagtagtctgtttaaaggaatgaagaaagacattaaatatttattttagttgacaagataaatgaaagctgctactgggaagatatctggcagttctgaaatctaggtttgtttttccacttccaaaacatgcccattgtatgcctttgaatggatgatacattaattagataaacattttattatgaggcagattataataaacatctactttgaacattttaatttaaagattctaatctcgaaaggaaatttaattccttcagagagtagaaagacatctttcctagaatgccagtaggctcattttggagggtctctagaaaattctagacctgcccaggaacagaagcagtttatctggcaagtcagtgagcctgcagatggccagaccattgttagcagggcttactcatgcagttctagttcccaggctaagcttgaaagtcatccgacccagcagcgaagccatttgatcgtaggaccagcactgttctgtctccttgttccccccagtctccacctttgccaaggtgtacttgggcgccagccccagggtcaggttgccagataatgtatccattgctaatgagttcagagacctctctgctcagggccaagcgacgggacagatccttctgctctgagactggctggctggcacaaatgagctgctaggatctcactggagaaatctccactgggctgaatcagctgagacctaagcctctcagccctgttgagctgctccttgtttgacaaaggctttaacccccaaattctcacccaagcagagaacttgcctcttctctgcccacttcaaaaccagatgacttacagaatgaagaaaggatggatagactatcatgacaggttctgtgtgtgtgtgtgtgcgcgtgcatgtgtgcgcacacacattgagacagttaatcatattattctagaaaaaaaaagtagatccttagtgcccaggttccttagcagtgctgggataaacaggtgtctgtttgtaccgtaggttcaaagagaaaatcaatctactggtcagctgttgaggtttttactaagcacccgttatagaggaagcaaaaggagaaagtggtccctgagttcaggggttgacagcctaggatgtgaggagacaaatgcataattttctgtaatattgtgcatactccttaggacttcacgagagacgttgtgctggaggaactggagagggctctgtggagaagatgaggctttagctggtcctggaggtgtcagggcttggagaagaggggagaagagaaggcataaagcttctgcagcaagaatgagttttccaggcatagggaactgaggggagaggggtcttccatgacagagggtacataacattttacagatgagttgaaaatcaaattgctcaaaagatggagagtaggttctggggggacttggaagttacgcagcatttactgttggtgtggttggcaaaagtgaaagctgtagatacttaaataagagtatggcaggttgcaagtagtattttagggcaatttggtctgacagatgtatgcaagttgacctgtttggggggtgggtttagagcagagacaggaaatgaggagccactgcttctgctttctgcttctgctttcctctccgtgttattgatcccctacaaggataaattataggactgtatccaggagtcatgccttctgaagtagagttgtaataatgagactgtggcatcacttctaacttgtgataggccaagtaaacaagacagtgaagccattatttaaagtctgtgagagaaccaagattttgagagataatatggaggtattatatagcctaggataggacatgatattgggtaaagcggccaacctggtggttcttaggcagggctttgtttattttagtgattacagcacaaaacaaagggtcctaagaatgttaagtgattcttcatggttctccacatttgccctttcctctgcccacttcccatcaaaaccagataccttacagaatgaagaaagggacactgaaatgacagccagtggtgtcatctgagctgcctattagagtataataaggcacatttctatgactatgatttaatatttcttcctctcagcacctccttgcctccctcgtttccttgaaatgtgaggcacaagtagaaagtgtccgagggcacctgaggtcacaggcaggacctgcagaaaagtgaaggtttaagcacagacgggttctgcctgcctggactccctctcacgtgctggttgacacagagacaaaggtggctctacctggggccacataattttcatgtttcatttatactgccttctactagaatgagcttgatgtagcaactggaggccccagttttcattcttgctctgtccctggacacctgtgtaggcatcgagcaaattgtctgcccgtcctggatgtctactccctcatctgcaaaaacttggggtgagccccttccagtggttcttggagaacagacatatgtgtgtaccggggtggtggggagagggagtcctcagaactggtgcttttctctcctcccaaacatggcttcaggaagggcaggaacaacaggggtttggttaaacctgcaactgtagattgagcacagtgttcttttgcttggatacatggtacaacaagaaagtctggattgtgttcatctgcatgtgtgtgtttgatttgccttctggggttagctcctgcccacatgctgtgctaagttaatatggtctttcttccttacatgctgcctttttaaaaactcagaatcacagaactgattggttaccaccctgaggagctgcttggccgctcagcctatgaattctaccatgcgctagactccgagaacatgaccaagagtcaccagaactgtgagttccaggagtgccccttgtggcttccttgtgtctgtggtatgtggccttgagtggggtgtgactggtgagacagaagaccaggtcacttcctccacagagctgctgtcttgtgtggcagacaagacttatgccctcaagatggttagaaaaccaaggctgccaccagcctatagactccttcgtgcaaattagaaaaaggacacttcctccagggagatgcacccgtgccaaggtgcacagctgaggcagtggagggtgggttgagtctcagtcccccataccacctccacggagtgcctgtgtgcagtcagtggtttgcacaccttgtggaacagcactgtagagagtaaaataattcaacatatcatcaacttgggtgcatgctatagattcaagtacatacattcacagaagaggagggcagggggagttgaggaaaggacacttgagttggaccttgaaggatcggggaggcttaggctgaacagaggggaaagtattacgggtccaacttaacacatatgttgaggtaggccacagttctcagagagcttgcttgctggatcaagggagctttagaaaaggctgtccaggcaacccagggatggcgtatggaaactctgctttgcagtttgaaagaagcctgagttatgtaaggactctggaagagggctgccacatagaactttctgcagtggaaatgttcttgaaatgtggctagagaaaccgaggaactgaactttatacaatgtagttttaattaatttaaatgtaaatatccacacttggcttgtagctaccatattggacagagaagttctagagtgtatccttggccatgttcccaattcaggcttcctataggcaggtgatccaggaccgttcccttgaatccatgcgactcatcactgtgcaagggctctgggcctataaccctgtacttggcccactgggggtgatataaattggtagaattgattcctgccctaagtgaccttatttctgaggaaaaaagaggaccgtgggctccttgggaacaaggggctcatatctttaacctcagtatctagcatagcgtctggtacagaacaggcactaaatgcactatataaaccgatgggcaagactgtatttggaaaagaatgcttcaaaacgagtgcccacagtggtgcagacagtggtgctgagaggattatgggaggattaaaaacgggtaaagtaagtctgagaagattcccagtggccctgctggcaatggagaaaacggaagggcagccatttgtccatggctcctaaatccacccatctaccccaaggctaagacagccaagttcagtgcagccagcagagtcacaaccccgcaagctgtatgtgaacatggttaacccactcttaaggagtgagatctttcttttcttttattggttcctctgcctcttcctcatggcttttgggtttgatttgacagtacaacagggcccattatgatatctcagagaagtttctcactgtgctctctggcaaaacacacacgcgcacacacagacacacacacacaaacaacctagattcagccccactcaggaacccagagatggggtaggagtggaggtactcttttatgcctgtgaatgtgaccccaccttagcctgcccaagctttgaaattgtaacatctggttccagccttccctttgggattccttcatgcttcctggtccctgaggggttcctgttttcaaaggcaggtgacagaatcatccaggcactgggacttagcggcccaggctctggcccagccgacccactgattccctagggcctggatttctggaccttcctgactttagatgtaaaactggggaaaagtctagccttccttccaagctaagggtgaagccaaggcaagagacaaatgtaaaaatttctgggaattcttggaggacagtattaccttttatcttgtaggatgggaaagcagaagaagctactgtcaaaggaaaaaaaaattgtgacttctgactaggcatatagaaaggattttccctcttgttcttcttagaacatcttcaatccataaaaagggctaggataaaaatggtttatgttttctgctgactctagggaaaataaggtgctttttactgaatccgtgtatttacttattaggcacactgaaaggtaactcacagcccaaatagaaatcacaggctctctctccccttgatggagccaagtaaagctgccctgagctcagaaacccatagctagcaaagggacaaacccatagctagccaagggaaatctgcttgggttggaaattggattaatgacagttatgacacgagcttgccccttgcccccgacccctgtctctcattcgtccttgaggttttgcaagtcaagtttcactacagactgacacacatgctctagactaactggaggctcaggtttgagacaggtccagattcacacactgggatcccccatttacacacatgtatgtcttagcctgtaaaggtttaccgttgaaatgcctggagaagctcaactagatttagatcattgaaagctgtaatttccaaatggattaataatttatacactgttactctgggcgtgaggttaggggtcagtctccctttgttatatgaggatattatgtgcttttaggctttttatggcctttaatcttattttcctatctattaagtagcaggcccttcaccaaggctggcattaatgaccagatgattagaaagctggcgttaattatattctactgacagagcaggcccttgcctgcaattgttagaaatgcacttaaaacctttgcttgctgcactgtttgatcaaaaagagtaagagccctgaatttggtttgcattaaggaccatctaaataagttaaatacaggcacttgaaattgtgcaagaatcattttactgcagcagaggagcctcagtggcacagataaagggagagcagagaggacaaaagttatttccttggttgagtccatgatggtttaggacagcggcaacagcaagtttggtcttcccagtgatttgtggacccaggtaataaagagaccattgtattaggagccaccagacatgttgtgtagctcagactctgtcactattgtcttgtaagctgtgaagcaaatcataaccctctggccttagtttcctcatgttaaaagaaaatacttatcctccctgtggcacagggttttgtttaaaagattagacaagatgatacaaccattttggaaataatttggcagcttcttataaacatatactttacaggtaagccagcaattgcactcctagctgcacccacgagaaatgaaaatatgtccatacaaagatttatacacaaatgtttatagcagctttattcataataatcaaaaactgaaaacaactcaaacatccatcaacaggcagatggataaacaaattatggtatgtccatgcaacggaatacaactcactgatgaaaaggaataaaccacaaatgcctgcaacgccatgatgaatctcaaaacatgctgagtgtagagaagccagacacaagagtagatactcctatacaattccacttacatggaaatctagaaaagacaattcgaatatatagtggcaaaaagcagaagagtggttgcctggaaccagggtgggaatgaagattaactgcccagaggcataaaaaatggggtggtgggggcggtgatggaaaagtgctatgccttcactgtacctttgtcaaaacttgttgaactgtatacttcaaatgggtgtgtgttttattgaaggtaaatttgaccccaataacatttatttttaaaaattaagagcaaacagaaaaagcttagactaggaatctttaatttgaactataattctgtctactgtttccactgaggtggtctttcagcaaatgactcagtagttttaagcctcagtttcttcagctgtaaagtgggaataacaacaggcaccccatggtgttgcctatgaaatgcagtgatgatgacctaatccttagtgagcgccctatgtgccaggcactgtgctgaatgctttgcagaaacgaattcatcttatcagatagttctgaacactgcaaagcactatacaaatgtaagttacaggaattcttgcactttgcaggtgcttgttaaattgtgaagaagaaagcaaaacataagtgtaaaggattaccaaactgcactagtatgaagagagccatgttcctcagctgtacagggctgatgaatggggaggaggcctgcgagcctaccaggagaaccggggagactctctgtctaccgagagcctggatatcctcccgagtggcccctcatgagactatctaccaacgtgtaacagactgtctgtgacaggccatgggcataatatgtattagtatctctaagaaagaggtggcttttcctatacaaaatttgttggtgacagttggtcaacacttatgtacctgataagccatgtgggtacagtcgatcctcagtacaaatggcagtggtatgctgggtagctaatgatgacagttattaccgttactactattattatcaatatcctgttttgcagaggaggaaaccaaaaccaagaaggattgttcctttccccaaatcccaagctagcaagatttcccgatcctccctccatgccctttcctaacgtctctgtgatttgggagcttctgagctggagttctgtaaattcccaaggaatgggcagttcagaaaaataccaaaaattctaacattattagactttaaagagatttattgattccttttgaatggcagcagatggaacattctggactggggaaggacagtctgtgatgtgaaacccttccccaaggtagacaacaaaagcgttttttaaatgaacacttagtagaacaatctagaagaggaaaaacctcataagtaggaagcctagctgggcggttgggagaaggagtataagtgatttattacagcttatgaagagactgtgtgtgggctgccagggtcccagctctttctcagccccaactgagaaagggtggggtggtttgcctctgcctttgctgtgggtcacaaaccttcagtggcccaaaaggtggcaagcctgacagatgacctggagaaatcaaggatatcaatgttttaaatgcttttattcataagcagggtattggtggtgggtctgctgaaaaaaaaaaacaaaaaaaaacaaaaaaaactgccctgaggtcaggctttctccaggctgcttagaagtccccccacctggagtgcttgacgggatggcgctccttacccagtgtgaaggggcttcttctcattgaaccccatgaagaaagtaaggcaggttctggacttggttctgcttatagctgagctggtctgtgagcctgacttgtccagggattggtgatgggccactgcaaagctgcatagtgagcgggtccctccctcagtagacagccttgggcaagtcatttcacctcttctcacctctttttcctatatttaaaatgaagagttggctgaggtgatccctaagctccctcccaggtcactctccctggtcctcactgtcgtggcgccctgttctgtctgttcccctgcagattagactgccctcccatgcgatctgctgagcctgtggtgcacacccctgccccacctccctaagctcagctctgtttctcctcccctagtgtgcaccaagggtcaggtagtaagtggccagtaccggatgctcgcaaagcatgggggctacgtgtggctggagacccaggggacggtcatctacaaccctcgcaacctgcagccccagtgcatcatgtgtgtcaactacgtcctgaggtaagcatgtgagggctggcgggccttggtgcagggtatgtgggggtgcccaagcttcccagactcaggatgacaggcctaggagatgccaggcctctcagcgccctgggcaccacctcagggaggtcttgcagggctaaccctagtgactgagaggacttcctgtggatgtcttggaacagtgggatactgggttgggatttttttttctgcgctttccctggcatctgtcatttatgccatgcatctgacccaggtggggaggcagatagcacacaatagtcaatattttctgaatggggaaaaaggaaagagaatcgcttatgcttttgggaaaaaaaaaagatgtcatgccttcactctatagtacctggaaagaaagctagaggaagtcatttctagttgtttctacagacagagaaaaacaaaagcatcaggcctcatatataccaccccactcaagtgcaataatatttaataaaacaggatccgaaacagacatacattcagaggatacctctgttgtcactacctccatggctcacacacttctattgtatggttctttataagacgccaatgcctggagtcctacccattttttgtcggagagcttagctatgagggtttccatgcatctaggggagcagaatttttctagaaaatgtggaaagtctgaatggctctttcccccccattagtgagattgagaagaatgacgtggtgttctccatggaccagactgaatccctgttcaagccccacctgatggccatgaacagcatctttgatagcagtggcaagggggctgtgtctgagaagagtaacttcctattcaccaagctaaaggaggagcccgaggagctggcccagctggctcccaccccaggagacgccatcatctctctggatttcggtgggtgcttcttagctaagccaggcccctggaaccccgttggggctgggaagagttcttactataacaggcctccctggctgcagctttttcttaaccagagctaccccagccccccaagtcttgttaatcacctgttagaggccaggccctgctgagcacaaaagaacaccacacgctcctgccctgataagaccatcccatatccgacctcaccaagtgctgtacgaggaggggttaagagaggacacccccctgagggtcgattctccaccatgggtggtgagagtctgagatgagagggaggggagaggtgagggatctgctccgaggccacttggacactgtcaaagagaaggggcagattcctaccagggtctggaaggacagatggcttgttcaggcagagggccaagttggagtaatgttgggaaggatcattccaaaaacacagagaacatattgaggcctgggattaagccctcaaacccacgacttcattaaagtgtctgcctgtccctggggatgtaagtcactggggaccccggcagggttttcagccctcggctgctccaatcctggaaacacccttgaagccccatgctccccagttcgcaacccgctgccaccctctcctggccttgctgtggctgccggaagagtggtgctcaccctggactgtgtcagccccttttagatgggttctacagcggccacgtgaggattgcagctaaagagaatctgaaacgcagcgggcccttggccagtaggtctcgcggcttgttttgtggcagtactgaggcaaatagctcaatagcccaattctcctctccctctcataccttccttgtctacccttccggatctgttcctcagggaagagtggctcctaatatatttagtctctgaaaattaaatgtcccaggagactgttccgtttaaagggagtctctacgttgactcatagccagagtcaaagacccatgtgttccagctgagccccagggtgttgggggggcctagccccaggcatgccttccagaccctcttagggccttctctgcggtttttgggcctcctctgccttggggtgagcccgatggttgtgggtgttcacctcccaggcccttgtctccacagggaatcagaacttcgaggagtcctcagcctatggcaaggccatcctgcccccgagccagccatgggccacggagttgaggagccacagcacccagagcgaggctgggagcctgcctgccttcaccgtgccccaggcagctgccccgggcagcaccacccccagtgccaccagcagcagcagcagctgctccacggtgagcagccctcttatggcgaggacacagagagggctccgtatgtatgactgctgccagatggctgaagggacatttgggacaggtactgtccttctcaggttatcacagagccccctagagtggccgtgacacttacctaccaggtatcagagctgttttcttccttttagtgttcatcccccaactccattgaaataagctccttgaagggctttgagcccccagctcagtccccatacagggcagtaacatcccgtatgtggcacagagctgcacagtttgcacagccctgctggccacagcctgtatcctgtttggtcctcaagacaggacaacctgtgaagcgacagtagcctcattttatgatgaggagactggaatttagagaggttgatgaattgacctaattcatacagcttgttaattagcagcccctctacaaatagttgtgtggtggaatggaattgaacctttgggtccaggaaggtatttcttcttccatgctggacttctggggagaccagtgccatatctttgactctgtccccctccttcctggcccctagcccaatagccctgaagactattacacatctttggataacgacctgaagattgaagtgattgagaagctcttcgccatggacacagaggccaaggaccaatgcagtacccaggtagatggctgtggagatcaggctagggtgtgtgcctgctgtctggtggacagcaaaggctcacatccattcttgtagcctcatccctttgttgtaaagagcagtggagacgtttggccaaggcccaggtcccctaaagaggtaggggtacagggtaatggagcctgtggtcaccccctcctcccactgtcaaatccagctcttccagcatatgtgtctcctacttagatagctttcttagcacacatgaaaaccgaaatgataccactgcacctttctttaaacaggccctacatttaacaagcatagccagatgtataaaacatgtataaacataggggacaattaatccctttataaacacattcatcttgtgattttaaaaaaataatcatttttatatgaaatgcactttaaaataaataacatctgtttgacaatttttcatttacataaaacttttcaggaacacatttattacataaggccaatgttcttgcaaaaactatgtaaacaaggataaggtagagggaggggtacgtgttttacaaaaccccagggaaaaccattaatcccccatttgtcttagtcttgagttcaaccagatttctgccttgccacttagtttgtttcttgatcctacttggcacaaatcccagctactctgcaaaacatgcccaattttagcttttctatcaccctccctcctcagcactcctgtagtatatatcatgtggcacttaatcacagctatctgcttctgctccttaaagattgcttagtattgcagtcattagtcagctgacacccactgagggtgtcagtctctgaagttagaaactgttttccgcatctgcttgtattcccctgcttgtatcatgcgtccgtcatgatactgccaccctaagggatgatctgagtatctgctgattggaaccaaagtctctgtccctggggtctggctgttaggctgttactctgcgagagtccacagatggacctgggcacttactgcttgcttaggcccgtgccagcttacaggagggagaagaggacaaaaaaaagccacagtgtgcaccacaggcctaagcattgtaggacaaggataaccaccacaggctggagtaggcagggctgactctgtggaagaggggctgcctcggcttcaagagagaaggcgggctccggacaggtgggatggggagaggagaacatttctcaatgtgcagggtgaagaggggataaacatgggggaaggctggtacatgatacaaggtcgtgtacatgacacagccaagtctgaggttttcctgataggccctcgggagccagtggaggcgtttgagcagcactgtgaaacagtgcttgagatgaatggctctgcaggagctgagttggaatagtgtttgtgaggtcgtaccaacccccttgcctctttgccggtgctgtctcccctcagacggatttcaatgagctggacttggagacactggcaccctatatccccatggacggggaagacttccagctaagccccatctgccccgaggagcggctcttggcggagaacccacagtccaccccccagcactgcttcagtgccatgacaaacatcttccagccactggcccctgtagccccgcacagtcccttcctcctggacaagtttcagcagcagctggagagcaagaagacagagcccgagcaccggcccatgtcctccatcttctttgatgccggaagcaaagcatccctgccaccgtgctgtggccaggccagcacccctctctcttccatggggggcagatccaatacccagtggcccccagatccaccattacattttgggcccacaaagtgggccgtcggggatcagcgcacagagttcttgggagcagcgccgttggggccccctgtctctccaccccatgtctccaccttcaagacaaggtaagtggcagatactcagctgtaccagcagggccgaaccgagaggcacccactagtaagatagctggacccccagggaggcccctgcccctctccccagccatctgataccccatttagcccttctctgagctcagactttggggaatcacctcaagccatgtgaggcctagtgtaggatgggtttttatctgggctgccactgagggcaggcaaagaagtggcttgttgagagccctgtacctcagtgtctcccttcggaccaccaccagagtgcctttcgtatctcggttcatcatctgagccacacagaaaattgagtgatgattttccctggttgaaaacagcaaaaagatacccctgcctccccttgccttttggctgcccccgggtcctcgccactgcagcctctcccagctgtgcctaggctccagaaatgccttcccatctccccagcatgctcatttcaccagctgcgagctcactgggctaaggcacaggggttggtacatgacctgccactcccaggggccgctggtacttgccctttatagagcagccaaactagttttcagtgggagcaaaaggcagaggagagacatgggcagaagaaaccctcctaaggactaacattgcccagccaggcagccatcccccagaccaggaggcttgagcccttcagcatcttatagctgaggaaggagacagagctcgagctcggcctgcaggtgcacagcctgcctctgagactctgccttttgggtctttgagtcatcacaggcatcagcattgggactggaagggcccctaagatgagaaggcactgagtggcatgtggctccagactccctcatagcctgctctctcgggcttggcaggtctgcaaagggttttggggctcgaggcccagacgtgctgagtccggccatggtagccctctccaacaagctgaagctgaagcgacagctggagtatgaagagcaagccttccaggacctgagcggggtgagtcatccccactggccacaggggcctctccatagcccttagggaacccagggctgctgagaggggtggggatgtggcccttccaagccagcatagcccttagggaacccagggctgctgagaggggtggggatgtggcccttccaagccagcaagtgccagccctgttccaggcccacccaacccacccagtctggggacctggttctctggccatttcccctttccatctgcccttcttactcccagggggacccacctggtggcagcacctcacatttgatgtggaaacggatgaagaacctcaggggtgggagctgccctttgatgccggacaagccactgagcgcaaatgtacccaatggtgagcagcggccacaggcctgggcctcctgggggttctggtggaaggactggggctcgggagcccatcctggttcttccattcaccacaggccgtacctgcctctctgagccttgttagaatggggcgatgtcctctgtctctcccgcagtcccacacacccaacttttccatctccactctgacttagatgatgccatcagagggtcctgaaggttggctgtagttctggtgactctgagcaccttttataaaggaaagggatgctagggcttcctggcctctcccctccctcaggccaatgctaccgtcactctctgactttggtctttcagataagttcacccaaaaccccatgaggggcctgggccatcccctgagacatctgccgctgccacagcctccatctgccatcagtcccggggagaacagcaagagcaggttccccccacagtgctacgccacccagtaccaggactacagcctgtcgtcagcccacaaggtgtcaggtgggtgtgcccaggatctgtcacccccatcccaggattcgatgccaggggaagcccacgtctactttttttccagcgtctgcacagtgccaggcacagggaggtgcttgacttgaagtcacctatacagggctcaggtctccttggatttagggaacctcctcacaagttccttgtgacatcagtgatcaggccccccagtgggtgggtctgagacacagctaaaaaactcaaactcaggctagaatactgaaggaaagaatgcagaccactaccgactgcccaaagaggactgaacactgaacactgggttggcgacccccagaacactgtaccactgttgacaggagcactttcagaagaaagagcaggcggccacagtggtgagggcctgttgaagaagagaagagaaagttcagagagagagagttgggaagcggtctgggcagaggcaggggatctcccgtctatgcaaggatgagcttgctgcgtggagaagggagtgctccttccctggggctttagggagaaccctcccatgatcaggtgccatccagggctctttccaccctgagaatcccggagccttgccccttcctcagttcttcatgtggatgtgttttggggtgtcactctgagttcaggcaggtgctgagaacatgccaaaacttccttcaggtagaacagcctggaaagctctggtaggcccaccccactggacttggttcaactgcaggcaccaatgcctgccttcaaccctgggccaccttcatcttgacagtatcttgtgaaacatatatgtcttcatgaggtttgtttggcctgaaaataattcgtggtttatggaaaaacataccaggcccctgttctaaaaggcaatttcctcagcaatagagtttggggaaggttatagttctgtgcttcagagtccaggctgtagaaacaccagacagccctggcttaaattctggctctgctgttgagttcaggggctggtatatatttatgtgcagtaagaggtagccagcactattcttcctgttatgtgaagcccacgaattaccttgaatattgaaatcaagggaaaatcatattcttttcaaaagagttgaatcatatcaaactcttttctgaccatgaataagagaagttagcaagggatggtgagcaggtatccattgatactgtccacaggagcagtcaagctggggaggcaggcatggaccccagcaaggatctgagctaggaggtgcaggaggcaatggccactggaacgaggctctgcagataagggaaggtgggtgggcatctcccatcggaggggcagaatgcagggcttccaggctctctgctgccacctaagcctttcctccttgggatgggggcctgtgtgtgtgctgcgagtgtcccccctgccactccctggtctgcctcctcggcaagagaatagcacagaggcaagaagaaaggactgctgagggtggtgaccagaaactggattttcagactgttgaatcttgaggcagtctgtgtttgcatctgtatgtatgtgtgtgttctgcatgttctgtgtatgtgagcataggtgccaggtggttcagcctttcctccctgctgccaggaggcatgggggtcagcaaccccaggctcttcctgaagcttccacatacctgtgctgcagcccgcacctcacgctttcctctttcttgggtctcagcaccccacctgaggcagtggttctggaggcagacacgttccccgggcatgcagcaggccgtgggacagacaccactgaaggagcagagtgaaattagggctgctctattggtatcccccagtcacaaagaagtagacacttttccaaatgttcgatttaggcctttaagttatggtaccaacccttctttcaggcatggcaagccggctgctcgggccctcatttgagtcctacctgctgcccgaactgaccagatatgactgtgaggtgaacgtgcccgtgctgggaagctccacgctcctgcaaggaggggacctcctcagagccctggaccaggccacctgagccaggccttctacctgggcagcacctctgccgacgccgtcccaccagcttcactctctccgtctgtttttgcaactaggtatttctaacgccagcacactatttacaagatggacttacctggcagacttgcccaggtcaccaagcagtggcctttttctgagatgctcactttattatccctatttttaaagtacacaattgttttacctgttctgaaatgttcttaaattttgtaggatttttttcctccccaccttcaatgacttctaatttatattatccataggtttctctccctccttctccttctcacacacaactgtccatactaacaagtttggtgcatgtctgttcttctgtagggagaagctttagcttcattttactaaaaagattcctcgttattgttgttgccaaagagaaacaaaaatgattttgctttccaagcttggtttgtggcgtctccctcgcagagcccttctcgtttcttttttaaactaatcaccatattgtaaatttcagggtttttttttttttgtttaagctgactctttgctctaattttggaaaaaaagaaatgtgaagggtcaactccaacgtatgtggttatctgtgaaagttgcacagcgtggcttttcctaaactggtgtttttcccccgcatttggtggattttttattattattcaaaaacataactgagttttttaaaagaggagaaaatttatatctgggttaagtgtttatcatatatatgggtactttgtaatatctaaaaacttagaaacggaaatggaatcctgctcacaaaatcactttaagatcttttcgaagctgttaatttttcttagtgttgtggacactgcagacttgtccagtgctcccacggcctgtacggacactgtggaaggcctccctctgtcggctttttgccatctgtgatatgccataggtgtgacaatccgagcagtggagtcattcagcgggagcactgcgcgctatcccctcacattctctatgtactatgtatgtatgtattattattattgctgccaagagggtctgatggcacgttgtggggtcggggggtggggcggggaagtgctctaacttttcttaaggttttgttgctagcccttcaagtgcactgagctatgtgactcggatggtctttcacacggcacatttggacatttccagaactaccatgagatggtttagacgggaattcatgcaaatgaggggtcaaaaatggtatagtgaccccgtccacgtcctccaagctcacgaccttggagccccgtggagctggactgaggaggaggctgcacagcgggagagcagctggtccagaccagccctgcagcccccactcagccggcagccagatggccccgcaaggcctccagggatggcccctagccacaggccctggctgaggtctctgggtcggtcagtgacatgtaggtaggaagcactgaaaatagtgttcccagagcactttgcaactccctgggtaagagggacgacacctctggtttttcaataccaattacatggaacttttctgtaatgggtacaatgaagaagtttctaaaaacacacacaaagcacattgggccaactatttagtaagcccggatagacttattgccaaaaacaaaaaatagctttcaaaagaaatttaagttctatgagaaattccttagtcatggtgttgcgtaaatcatattttagctgcacggcattaccccacacagggtggcagaacttgaagggttactgacgtgtaaatgctggtatttgatttcctgtgtgtgttgccctggcattaagggcattttacccttgcagttttactaaaacactgaaaaatattccaagcttcatattaaccctacctgtcaacgtaacgatttcatgaacgttattatattgtcgaattcctactgacaacattataactgtatgggagcttaactttataaggaaatgtattttgacactggtatcttattaaagtattctgatcctaccactgctggtggctcttatttcctgtggatttatcatgggctatgccaatgtaaagtgaagtattaagtcgttcatataaattgaacattagcacagacctttatgagactactgaagtgagctgataagactggtgaaggaaagactgtgttaaatacttggtagttgcctaagtctgaaaattcatattgtatcttccatatttctgcaagtatttttctatctatctatctatgtgcctcggggccattttttgtatcctatggggaacccaaggaaagaagtcatggtctctgctttcagaaaattacatgaagtcgtttgagagccacactgttctgtatattcacatagtgcactttgggatggaggtcccgaagggaaaggggcagcctgggcattaggacttcaatttggaggcggctgggctggagtagggtcttcccaggtagactgtgattgggaagagcagagatcccctcggccagagacagagcacagtgaaagcccagaactggacatgagcatgatatgttccccaattcaaatttcacttttccagatcatgacctgcttgtgagcagacctttgtctccatggagagatgggggcaaggggagagaccgtgcagcagcctgcgctctcactgtctaccctagaaccagccattccagcagcatgtactttgcctaagcatttggtccatatagtatggtctcacatgtttgttagcttgttagctcactggatcctaggtctaagcaatgccatgggcacccattctacagctgaaactgaggatcttatgacttaagcaagtcacagcttgttgatgggagaaatgaaactgaaaccccttcctggccagtgcgtctctcctcttacaccttagactgatggctgggaggctgattttatgacaggaccctgttctcatttctaaatagaaaattcatgtctttattactttagcctttagacctccttctggttcttttgcttactcttctcttccaaatcttggggcctggaccttcagattggagtttctgggctctgccaggttcctacccacctttgcctgccatcttggacttcctgaaaacatcacctgttcttttctgaagcttttctgtgactgacacatctcagcccatccttcaggagcagagttgcctctaagcactggctaattcaggatccaggcctggaaaggtgctatccatcccagccccctaacaactgcagggtcccatggggtccacagtgctgtccttgggccatgattataccctcctgctcctgggggtgctgggcagctcaaagctcctcttgcttccaagtccagcgagcaagccagagcaagccaggaacacaacgaagccattgttcctgatgggtcagaggagctcagcctccaagcacaagacacaagacccacacaagccatcactgcttcatgttttgcctcaagcaatccagtgaagactgacttaaatgctcc

SEQ ID NO: 184 - DNA, 54271 bp, Homo sapiens
  source 1..54271: mol_type = genomic DNA
gagggccgaggtggacagatcacctgaggtcagggattcgggaccagcctggccaaaacggcaaaaccccatctctactaaaaatacaaaaatcagccaggtgtggtagaacatgcctataatcccagctacttactgaggcaagagaatcacttggacccatgaggcagagggtacagtgagccgagatcatgccactgcactccagcctgggtgacagagcgagacttgtgtctcaaaaaaaaaaaaagaaaaaagaaaaaaggaatgctgtggggtggaggaaggaaaaggggcccaggagaagcctaaatgaaaggggaggaaaggtgctgcaatggggaaacaagtttggttttgattttttcattttcctcttacacttctacaagcagtcttgatcaaacatattccctggaactaggctcgagatacccataatccgctcccaagatgctgataggcaacatgagatcattcatgagcccaaacaacttctggcttctctctgttgcccaaagaccccaaggggctcaactagtaaactgtggtgggaaatatcctgcaaatagcaggattttttcaagatactggcagacagttccatttcaatggcaaagggtacaaagagatttaaagagagctgcaggtggtgcagtgtgaattttactcacatcctgagccgtggggcagaggtaacgttaggaactgagatgccctcctgtaaggtccagaacacaggctttggctaccaaagacagctaacacactacccactttcccctaggagcccgctcacacctcctcggggatgaagtcaggcagagccttcccctgagccccaaaacacctagaattcatccttattgccatggcgtgggtactttttacttaactgactcgcccattgggcagtaaggccttaacttgccagagccagccatctagtatgtgcctggtccatgtgcagtgaatgagcaaataccttgtcaagccagatcagcaggcccactgcctagagaagttccattcctgaccacatgttatatgtctacctggtgcctcacaccagctaggtaataataataacaataataataataatagtaatactaataacgagtgggcatttcctgtgttctgtgtgccaggcactgtgttaatgctggggtcctgcattccctggctgcatgcctctcctggggctgacttcagtggagcaatgctgctaacatctctaacccactcctcattcattcctccccaccagagggtggcttctcaagtggaattgagggacagaaggaacaacctgcttgactcagtgccatctggcttctgcagatctgcttgcccacaagaaaggtgcaccctgctctgctcccatcgtgcaggcaggagctgaggggacagttctgcccctgcagtggatgtctgccccacccggctcagcctgggactgggtgggtctagttcaggggaatgatgggaaacatactttgtccctgatgcgcggcatctcatttattgaagacgtacatgttaacatctctgaaactgggatgcatctttcagttggatggcacaacatagttggctgtgatgtttctttcttggtaggacatcttacactcaatggcatcttagattcaaagaaacttggtaagcaacattctccagttagccttatcaaagagctgatattttgctctccacctgtcccaaggaattagtatttaactggctctgagcacaggcagtgggggaaggggtcttatttatcaccatccccaccatcctaccccttgccctaagcactttgcatgtcctgaactatgcagaggaggaagacgccttccgcagcctaaagaacatgaatggcccgggccagggagaggagaagcactagcaagccaactgagacatgcaaggactcatgtggtccaagtgtgtgtgtgcacgtgtgtccatgagtacatatgtgttcacatgcatgcgcactcaggccttgcccctgcagcctttggcccacacctgcagcctgtcctggtcattgtctcagcccactcttcctccttttgctggactcctcaaagattcccaaactccactccccaatcctctcatctggcttctgccctgacaacaaaggtcgctgttacgggttgaattgtgccccccgccaggcctctatgttgaagtcctaactcccagtaactcagaaggtgaccatacttggagacaggccctttaaaggggtgattaagttaaaatgaggatgttagggtgggctggtatggaccggttcaatatgactggcatccataaaaaggggaaatttggacttacagagggaagatgatgcgaagagagagtgggaagatggccacaggcaagccggggagagaggcccagagcagaagctcccctcacagctctcagcaggaaacaaccttgcgcacatcttgatcttggcttccagcctccagagctgtgggacagtaaatccctgtcggcaaacccatgggtgctgtgttacagtctgaggtgctgtgttacagtagcccaagcaaatgaatacactcactgataatagcccagtgcccacactgacagccactcctccctcctctttcacttgatttctctgtttttgttgttgttgttatttgtttttctgctctgtcacccaggctggagtatagtggcacaatctcggcccactgcaacctccatctcctgggttcaagtgattctcctgtgtcatcctcctgagtagctgggattacaggcacccaccaccacacccagctaatttatgtgtttttagtagagatggggtttcaccatgttggccaggctggtctcaaactcctggcctcaagtgatctacccacctcaacctctcaaagtgctgggattacaggcatgagccaccgaacccggccatttttctctgtatttaacaccaaaacttcatcttcagcagcaatggcacagctcctcctggcatctcccactgctccccttcatccaggtgcctcccaacactgacgtctcccctctcctgaacatgctggccgggtgacctccttctcatcctggcttctacccccatctgaatgctgatgaccccaaagctctgtctctaacttacatctgtgctccgaggttcagaccagatatccacctgcctcctagacatctctgccgcacatcccacaggcatctcaaacacatatccaaaactgagcactgagcacctttcctggtctctgccctccctggtactgtctatcccagcaaaggacaccaccatgtctcagacacctccctggttctactgctcctgagactgggtaacagacttctctacatacccagggcacccagttcccctcggtaccctgggtcacaccgtcctgccatggatcctgggacatctttcacggcaggagcagtgttggactcacctctatgcagagagatctcagacgcagattctggacacccctgtcctcgaggaagggggcagaagcccttccacaccagctatacaatgatcaagcaactgccactcaaagaggcaccatatcacagacaagtttttattatcctgcatagagaacccaagaaatataaaaacatctccagaaggaaccccctccgactggccccctccctcccagggtgagctcagaccagggtaatgggggcttgcaggccacctctgtccagtgaacaagttccatataaaaatagatctgtagagggttcccagagagccatcgccccacatcacatctgtgcagggctgaggcctgggacccaacaggattctgggacctcactcctcagtggaggggagatctaccctggacaccgaagtcctgccaacacagccaggggcccttctgcagaaacagctggggtagggggaggagattttgccctgcagagaatgactgatgtagctggagatgaggacgaggctccatccacccaagaagggatgctggtccaggcttcccaggaggggtggggaaggcggatcctggagggcacctggccgggggctcccccaaccctgactaaggtggtagcaacatcttggtctccccagtacccccagagtcactgagctggggcaggtgctcaggagacagggaggcagggggctggggggagattccaagagcaggggagctgctgctggcagggtaaggccaaaggcacctctgtgagtcactgtcccccacctctgggtgctctgcaaagaggcactgcaccttcccgcctctgggctctttctcatgctagcctctctgcatggactccttttgtccgaggcctgccatcttgcctgccgaaaactccacccaccccaaggaaagaaccttccctttcccacctgcaaggccctgttcaacttacatctcaacttcacacattaagagagtggctatctccccctccagcccacctacccactgacccagagggctcctggggggccctgggcactgtggatggtgccctggaattacttcttggtacctgagctcttctcctggtctagtctgagccccccaagggcaggctgtgtgtctttttcatctttacctcttgtctcctctttcccgccccatcccaccccaccaacacacagccaagcagagcagacaagtgtcacgggcggcctaaacaaactcagtccctgtggccctgctgagatccagctgccttcctgccaccctacgaaagctctggcatactgggccccaccattcccgggggcccttgtggataaggaactccacggtgggctcagcacaaccacttctgccagggctcttcaaagtcagagcagggaggggctccatggaaggctgggtagtgcccaaggcacggagctggctggaggggagtcgcctctagagtccccaagggctgtacagggaagtggtggtgccatagggcaggaccaaggactctctccccagagccagccttacccctggattgggttctgacctcagctctgctcctgactcctcacttggcctcagtttcccccatctgtacactgggggttagaccagcctgtttgagagagaggacccatctctgagtctcctcttcaccctccccatggctggagagaaaagctcttgggtccctggggagataacatggccctttatgcttttcccagatgtcctggccactaagttcataaaaggaatgcacacgagggcctcatggggccccagggagcaccagggcctctcatggcccggcctggccaggacttttggcctcaccctgaactgtcagcccaaggcagggggacacagaaaccagatcctgagtctagggctcttgggtatcagcccctgagctcagcaccatctttgcctgcctgagccttggccagtgtccagtcagcccctgccaaggcacagggagctgaggtggatgcacctctggcccagcccccgacgcctgagccaccaggcagctgcagtcactgccaggtagaagaagacccccccaggacccacgctgtctgactggtcaatgggtctgtgggaaaagggaacaccccacggggtaggccccagcccccagtgggtacaaatggcagtagggcatgagccagggcaatctcaacccactgtcttccctcccatccctgccccagcttttctctgagaccccgaatttcctcctgctgttatctcaggggtcctccctagggatttgaacctcttttcaggggcactgagttagccaaggcgttcagactcgtgaaaatgggaggggcaggcagtgaaagcggggaagctgtggccccaccagatctgggcccaagcagaggaagagagcgctccctcccacactgctggagcgcagcttgccacggtccttgggcagggctgggggactggacccccaccggagtcctgccttggaagaatggggtccactcacacctgcaccccctggccctgcagctggagcactcgtgcctgcagggcgctgatcccgctgaggagggcctctcgatgttcagccaaagagatgcctaggctcaccaggtccctgaaacaaaggctggtcacactcggctggcttgtccccaacttctgctcctcccatgaaggccctccactctccctccgcttctctggacaggttgggactccccagtataggcaggggcagggcctgtggaatcccccagccccggccttgaccttggtgccttggactcactgggcagtcatctcggccacggcctccaggctcccatagccagcagccgcgaagctgtccttgtagcggcacaggtccagggcctccagccacgcgcccacagagccaaaggaggggaaggtggagaaggcacggtccgctagtggggtgggaggcctgcgggtcagaggagctgtgctcaaccgacagctgggatctgggcccacacctggtggtctcccggggagaggccagctgaggatggacaggagaaggggagggtaaccgggccccagggctggatctggctcacatgagcactgtgcattcgtgaagaagcgagggcttcaggttcttcaggcaggtggaggcagagccagcgccagctaaaggtattggcgtatccggaacagtctggggtaggacacgcctaggactggttggtgactcatattgggaacaacgaatattaatttcacatatttgattcattggaactacaaatgtgttagggctattaccacatctatttctccagtcaaaggtcattgtacccggggatgtgggcaaaatccaggagaagcagaagtgaccaggaggatgtgcagtgaggtgggcctgggcaggcaggcaggctacagccctctggggcaatggggtgaacaattgctcttggacaggtggggtggtggaggcggtgggtttgcacttgcaacatgcagggaggccctccacggacaggtgagaggctggctgtcccatgtgggaacgtacctgggacaggtagtcagggcacacttggggggctctgggtcctgcaccatcttgctcaggatgctgtggatctgggagaacctgggccgctcacctgggtccttctgccagcagtcgagcattagtcggtgcagaaggttaggacagttcctggggggtggcagccggaagccatcctccacagccttgatcacctgggccacaggggtggggagcagagaggaggctctgggtttccccagcatatggtgtgtgcacacacacatgcacacacacagacacagacacacacacacacatgcgcacacacagacacagacacacacacacacacccaaggaagcctggggcagtggccaggcagaaccagaagcaagcagacagagaagaggggcctgaggcaggaagattgagggccaacgggcagaggtcaggaagctggggcctgagctgagagggtcagaaggcatgcagctggagccacgggttactcacgtcttggccagacatgtcccagtaaggccgctccccaaaggccatcacctcccacatgatgatgccgaagctccacacgtcactggcagagctgaagtggccaaactgaagtgtctcgggagcggcccatagcgctgggctccggccactctgtaggggcaggcaggtcaggggcaaggaggaactgggtgacacgcaggtttccccaccccactgagccccagatccagcctgcatgtcatcctcccaggcaacccccaactccagcttcacatctgggaaagacagaaaagctgacctcaaggtggggttcactcgcatttatgccaagaccaactgggtggaggggcagggaaaggagtagaagtggggagttaagggctccagggcagcttggtgggaaccagaaggcacaggcaggcttggctgggggcgccctcaccatagtggtgtagacagcctctgatcggtcccgggggccccgcccgaagccagagatcttgcagacaaggtcgctgctgaccagcacatggcgagctgccaggccccggtgaacgtagcccatctctgacagatacttcatggctgatgccagcccaggcagcaaccccatcagttgcccagccaccagctgcccctcgtgccgctgtggagggagaagactgaggccagggctgtgcgcttggatcccctggtgttgtgtgacaccagggcggtcacctagctctcgccaggctttagttcaccctgtgaccacaggtcagcccggccagtggggatgatgccaattccaagccctaccaaagagaaaagtgagggacccctgcccgctttacagaataaagtggtcattggcagccccagggccactcaccctgaggaagccgtccagggccccatggctcatgtactcggtgacaatcatcaaggtgcttcctgtgcccagggatgggaacacacatgctaagttgtccactccactccgcacgcacacaagtttcccccccagggtcccagactgggcctcgagagccagaaccagcaccaagctccctaatctcgccatcctcctgcccagcccagggtcctctatgccaaggaacaaaagaggagacatctgtaggtgaacaaagtccaaggtcatgagctgcaacaagcttgctaagaaagatcactctttctaggagtgatattctaggggacctatcacaggtcagaaaggtcatcctggccaggcgcggtggttcacgcctgtaatcccagcactttgggaggccgaggcaggtggatcacgaggtcaggagatcaagaccatcctggctaacatggtgaaaccccgtctctactaaaaaaaaaaaaaaacaaaaaaattagccgggcctggtggcaggcacctgtagtcccagctgctcgggaggctgaggcaggagaatggcatgatcccaggaggcagagcttgcagtgagccgagatctcaccactgcactctagcctgggcaacagagcgagactccatctcaaaaaaaaaaaaaaagaaagaaagaaagaaaagaaaggtcattctgagccagagtggccgctccaggagaagggccgccttgagtcagtgaaagctgaggtccctggctgaagctccctcccatagctgagggaaggacctggagaggcaggggcactccaaactcccacaccatcatttccaccccccatacccgtgggctgggcagcaggaagggagcaccgggccctacctcgggtaacaacgccctccagccgcacgatgtggctatggtcaaactggcccagcgtgagggcctcggccaggaagccgagcctctgtgagtcggaggcgctgtccctcagcatatgcacggctacgagcagctcctggcgaccggggagctgcaagcagccacagcacagctccccaaaccgccctgtggggaaacagcacctcagataccgccagaggccactgccctggctgagctgggcaggctgagccgaggagaaagtgactctgaccagcctggccaacatggcgaaacccagtctctactaaaaatacaaaaattaaccagacaaggtggcacatgcctgtaatcccagctacttgagaagctgaggcaggaaaatcacttgaacccaggaggcagaggtttcagtgagctgagattgtgccactgcacttcagactgggtgacagagcaagactcggtctcaaaaaaaaaagtgactccagatcatggactgtttccagcttaaatcctggtaaactgagtaccagcagtgtgacctcgaattccatctctttccttttcttggcctgtctcctctgtgaaatggggattcctctctgccttcctcagtggggggaggtttccaagccttaaagaaaggacagggcatatgccagcacgccgactgccatcaaaccccatgtgacccaggatggatgacaatgacatctattcttccaccctgcccctttccggcttctgtccagcgggtctggagacagtgtcaggggataatgtcaggctcccagtgaaagcagctaccgtctctgagcacaggaggctgaggatttgtagtcaggaagaaaggctagcagaagactggcccttagagagcaagcgccgacagccaggccctgtgaggagtgctgggagttccccacattagcccccagaaggcagatatcatgcccatttctcagatgagaaactgaggctctgagcaaaacagggccatgaccctgatcatgcagcgggtcagtgggagagccaggactagaactcagttatgtctggcccctaagcttgcaaaggcccctccccactgccccatgaaggcctgggactaaactgccagtggcagtgtgcagaggtctgaccttgaggaccaggagagggtcacagacccttctgccatcctcttccctataatcaggcaagccagggactttctgggtggagggtgggcttggtgtggaggcagggcttccagacacgagcagagacctgggtggaggtgggcttcaggatagaggtgtggacagagtaggggcggggcctatagagtgggtgaggcttccagatggggacaaggcttcctgggcgcccagcttgcctcctccaaggctcctctccagcgtgacgcttttcgcatccagttccttggcgaacagatgcacagcctgcagcaggtccccacagctctgggggtccaggaatgtgcgacgtgttgggactttgactgggagagaaagagatgagcctgaggaatggggcctccaccactggggctgacaagcgggctcatgcagtgtagcaaggcagagggctgaggagtgaggcagggtggagcccgcccctccccagccaggcccagccaactcacagtggaaatacagctcctcttcatcatgggcatcccctcctcctttgccatagctgcagggcctggcagggagttcagggtcattctttcagccaggccaccccggcccttcccattacagagcactgagggcagcacctctttgtcccttcaaaagacaaggcctgtgccctgggggagggaacttcttgtccagctggtttaaaagcttctctgtggtttgacgacctccccatggcacagatacaaccgtagccctagaccaaaccgtcaccaccaccaccatccctagctactttcacatggtgaaaattattgcaactccagaggcacccaatccacatcctggctgcaggcccccagctgcccccgcatgcggttttgtgaaagtgtgaataaggcaagcggatccagcactcgggggcagcttctggtctggtcaggaaaacaaacatggagagttagccacaagcccactcaccagtgctggcaaaggagaaaggtgctgtactgttgggacacgggacagacaggcctgacctgatccaaggtcattgtggagggcttcctgagacagaggcagccacgggccaaaggactgcatcacagtcaacaaagccacaggccggtacttggggcccctaggggcagggccttgctggccaagataaagactttggcttttattctgggagcagaggagagcccctgtggggttgaagcagaggagtgcaatgatttgatttctactttagaaagagctccagttgcagagtggaagctgccacgggtgtcaccacaggagaggagctggcagtggttctagctatggggtcaacatgggcatggagagaggcagaggactcgagtgacatgaaggtgacaggggccacagggctgagaggttgttggatggcagaaaggaagagggagaagttgcccacagtttatggtggtgccatttactgggatgaggagacaaaaagttcacatttagacatctgagtttgcaggcctgggggataagcagggaagataagacgggcgttcgacgtgtgtgtgtgtgtctggagcttggaagagaggcctgctctgcagatacaaatcaggagcaatgagcatggcccagggagaggatggagtctgagaagagggactaggaataagtctgagaaaccccaacatctaggctagcggaaggaagcaccaaggacagtacaaaagaatcgccagaggaacagaaggagagcagagggaaactggggcagggtatcacagggaccaaggacagagaaagtagaggggatggtagagagaaatcacataaaggtacaaggatgagagaccaagggaggagtttccgaagttttcacaacagagatgatcacatgtagatacagatgggaaggaggagctaggctgtcacacagggggaagcggccaccgcagggtgttgacagcctgggctcggaacctgactgcagggacctgcttcccagcatctccgctcggtagctgtgggactgggtggctccattttctctttaataaaatcaggataaagataggcctgccagacagcagcatgtcagcttaccaagcctccacacatgttcactgttatggggggcagaggggaacattaggagtaatagtgggctcccaagatggcaaaagggtggggttcagccataggtggaaggactgatcctggctgggaggatcacctcctctagagaaaagggggtgaggatgggtgcagaagcaggcaggtttgtaggtttggtggtgagtagtccaggggccagtgatgaggctaaagaacaggtgtgactggtgtggccaagacagcaagctgcaaagacagggtgtctgcagaccaagaagggaactggattaagtattggggtgaggccaggcatggtggctcatacctgtaatcccagcactttgggaggctgaggtgggtagatcacctgaggtcaggagtttgagaccagcctggccaaaatggcaaaaccccgtctctactaaaaatacaaaaaattagctggatatggtggcacgggcctgtagtcccagttactcaggaggccgaggcaaaagaatcagttgaaccggggaggcagaggctgcactgagctgagatcatgccactgcacctcagtctgggtgacaagagcaaggctccatctcaaaaaaaaaaaaaaaaaaaaaaaagaagtaacgaggtgaagcattctaggaggatggccaggaggaacagaagagatgatccttgggaatgagaagtccaagaaccgaggggcaagggatgggacaggctgtctggcagctactgaagtcacccagggtggtgacaggacttccacgaatgaggagcaacatccaggagagatgggtggagatgaaggggggaaggctgagtggatggaggagcgaaagagggtgcgtggtgaggagaggagagaggcttccactggaccacacggtctggtgagaagtgggcaagctagggtggactggagaggagggaaattggaggtgagggaccatggcgcagagcaggtactacacccaggacggtgtgagaggtgctgcagacagcccaccaggctgggacatgcatgctggaggagaacacctctctacccctccacactagactgggctcactctccccatttcagagcagctggatttggaatcccgcgctggcttgctccgcctctgtagtgcacctgtccctggggcgctcctgtcctgcagagcctctgcccggaagaggggctcttggcttgcttgtctccctttcctccttctgcctctcagagcctctcagtgcaaagccaggatgagatgctctcggcatctgtccatctctgcttttccaacgggtccagcacatggacccttcatgctccacgagcaaggaactccctactcttgtcctgccctcctgatttgcctggtccaggcagagctggctcctagactagcgagacagtgttctctcccactcagtcactttcagtgcctcattcaaggccaagcaaattagccagtgccaaatgaatgcccattgtcgttccagctgccaggcagtttcaggatgctgagatgtggctccccagcccgcccagcctgggacccatctgggcgactctgcctgcagcagagtgtggccctggggagaaggggaggatacatggcagaaggcctctgctgcctgcaaaaggactagaatcttctctgaaccatactcaagctctatgtcttcctcctatcccctttctctgctcaccctcctgcaagcttctttctgctgggggtgggaggtttctgctttatgaaatgccctccctgtcctgcccctcccacacacatacatacacaagatttctgtcttttcccccttttcctgtgttcgagggcctcaagaggcccggggacaggggctgggggcctctgagctcctccggagaattctaatcacactggagcagccggagcttgattccttcctcagtgatgccttctgacatttaatgagttaaggcgctaaatccccttcatcccagagcagctgagctagctgcagtgctggctgccacatgaacagtgagctggggggaggggccgggatgatgcatgcctacatttgtacagcagtgtgcttgcaggtgcaaatctgcgtgtgtgcaaagtgggcagagatgcctgtgagcacacattaatgtgcacgggacatgacccaccaggagtcacctaggctggggccagccacctacctcctccaaatggccagcacactcatcacggagcccaggacgaggagggccgagatggtcactacggtgacgacaatggcggggctctggtccctggaccctgaggcagctgggaggaaaatcacgaggttgaggcaggcagaggaccaggctcctaggcaagccccagggcagactcctgtcctcaccctgtagcaggattcccatagcacctctgcacttggcactgcctcccagccacagaggcgccaaggcagtcccactgaccacagtggcacctggagtcccaagagcttcctctgctctcagggcagaacacctccacagcagcccagctcctgctcagagaggcaggagtccagacaggcagggccaggcctccctctatgcctttcagatgagcagtgagggactcaaagttgctctgcaggaggaatggcctctgctctgagctccctacccccagtccagaccatccaccaacaataataaaaagggctaacggtaactgcaccttactccattcaagacactgggccatgtgcctacactatactgtcttgtttcatcttcacaataatccaggaaggtattaccatcttcatcttacagctgaggaaactgaggttgagaaattacataatttgcccaagatcacatggctaaaaagtggtgaacctaagatttgagcatcactccaaaagtctctgcctgattccaaagcttctgctttgaactatttctccaagagatcagcctagaggaccctcgctctcagccctattcatcgatctatccaatcaacccatccatccatccaacctatgtgcctggtttgcattagtactgaggagagaggggtgaatgggcctacgggtgagacagaaacaaaaatcttaactgtagaatgaaaaaagaaacagaaatgagcagagctgagcagaggcacaataatttcttcctaaagccaatgaggaaggcttcacaaaaaaaggtgccatctgaactggacctggagactggaaggatttttgatggtgctttgatgcacacactgggtctgaaaatggcaagtcgtcccctgtgtctgggaaacagactgcatgaaggcggagagtggcaaataggaagctggagggtgggaagatggagggaactgggggagccagaacctggagggccttgaacgctaagctaaggagtataaactttctcctgtgggtgacagggagcagtggagagagttcctgcctaagaagaaaaggaatgagggtgtctgctgaggtgggagtgaggatggagaagaggtgcttgagagaggtgaaggtttggcataactattaggaatgggaaaagtactaagtggccctgaagactgaactgagattggaaagtacacctctttaggcagcttccgcgtgggacacagggaggagaaaggtccaagtctggggactagcaggtgggtgcagcaaggtgcccagggaatgagggttggcagagttggggagtatttctgatgagatcatctgcaggggctggatagagatgggtgtggggccaggaggagctaaaagtctgggagatgaggtaggatccagtgagcagtctttcggatgtcacagagcaagtgaggaggaacagaagacgagagttagaagccaaaaatgctagagtcagagagggcatttcagagcccagggttccagaggcaaagagggctgagggtctgggtggggatagaggggaatagagttgccaagaactgtttgaaatgaggcaaccatgtggacacagaaacggagaaagatgccagcagtgggcagtctctgagatggcatccctacctcctggtatccattccccatgagcacaggctggactcatttctaatgaacagaatatggcaagagtattgggatgtcattcccaagatcaggaaacaagatgaatggcttctgtcttgggtgccctctccctggctcacagtctctggaagaatccagtggttgtggtgagcagctctaaggagaggcccatgggacaaggaacagcatgcctcagcagcagccagcaagaccctgagcagggaggtgaactctcccccagctaagccccgagatgatcacagcccctgaggacaacttgacggcagccttggaagagaccctaagtcactggcacctagctgagaggcacctatattaccaatccatggaaacataagattataaatatttgttgttttcacctgctagatgttggggcaactcattacatagcaataggtaactagcacagtggtgacgcataagcgttcaccaagaccttgatttggggctgggcatggtggctcacacctgtaatcctaacactttgggaggccaagacaggagaattgctttgagcccaggagttcgagaccagcctgagcaacatagcaagattccatcgctctttttaaaaaaagaaaaaagaaaaagatcctgctttggaaggcggggggcagtggctcaaacctgtgatcccagcactttggcaggccgagtggagggatcacctgagcccaggagttcgaaaccagcctgagcaacatagtgagacccccaaaaagtaaaaatattagctggtcatggtggcaagcgcctgtggtctcagctacttgggaagctgaggtgggaggaccacttaagcctggaaagttgaggctgcagggagctgtgattgtgccactacactccagcctgggtgacacagtaagaccctacctcaaaaaaaaaaaaaaatctcaatttggagacacagctcatgggaaaccacactctgcagattgggagaaccatagccagggccacaagaagggagactggggatctcagcagtctctactatctgagaggtacccaatgaatggagaccatcagcccttctccactgacggtccccagctcctgcccccactacgcccactccagccaaacctgcccgcctttgttcagatagcttcctctccccagaatgcctccctgcccatctgtacacattcaaatgatccccagctataatcttctctttccagcacctggccgaggtctgacactttttgcattcaggcgagaagtgtggtcttccttcccagaactcagaccccttcagcattttatcttcacttccctttggactcagagctcttcctatcttggattagagtcatgtagcaggttggaaagaattattatcttgacagctggtgccagaatgcctcttagggggaactgcctttgttcaggaaaatattttcatgagctgctcagggcagatagaggtgagatcctgaggaccaggttagcagcaggcaaagcaacaagacagctaaactgctgtgcacacatcagggaattgggcagtgggtggggagaagaggaaccaggggagggaagtaaaggaggagggaggaaagcacaatattgcggagaagccggagatgttttcagatgaggatattcaatttccagtttttgtttggttttggtaacagctttattgagatatcgttcgcataccatgtgatttacccacttaagttacacaatccttcttttttttttgagacagagtctcactctgtgacctaggctggaacgtagtggcataatcttggctcactgcaacctctgcctcccggttttaagtgattcttgtgcctcagcctcccgagtagctgggattacaggtgcccgccaccacgcccggctgatttttgtatttttagtagagaaggagtttcaccatgttggccaggctggtctcgaactcctgacctcaggtgatccacctgcctcagcctcccaaagtgctgggattacaggtgtgagccatcgcgcctggccgcaatccttatttttgtgtttatcactgcaatgcaaccccttcatgtccatcaaccttcagtgaagtcagcatcacgctctaaggcctagtggggaaagggacagtgtcccatgtttgggtctctatccaaactgagtctctatccagctgagacatgggttatagctgttcacaaatccctctcctgtgagctcctccaggacagtttcccaatctaattcacgtcggtgaacaggcattagtcagtggatttcaaagtcattaattaattaggctgtaattaattaaactgttctgcaggctcccttcattgcacagataactccagataactctccccctctatttgtctccctacctcagccccgtgcagggttctctctgtctaggtccctgtccactcacacacactacttaccctcccccagggtctgtacttcaatgctggggttaaaactctgggcctcccaggatggccccggggaagcggcccggatctgaaagacgtagcgggtagccggcttcaggttggtgacggtgactgtgggcgcccctgtcttcaccatggagtaagtctgctcactctgaccctggagagagatcaagaagtgaagcccaccagcgccagatccactgttctaggagaacaaagggtgaacaggaacagggaggcaggagaagcgcccttacgtgaatgtgggctgagtgcgaaaacccaacctcaatcatcttggggtttcccagggatcttttccttggatccttagcccctgtcttcaccacaagcacccacccacactcggtggcacttgtagctgagaatagcaccacctctgcataagagaaattttagagaagacaccagatcctccttccgggggatgataggatgagggccaccagggcctgtccatccaggctaagctgagccagtgccctaggcaggcctgaagcctcaaaggacagaatgagagaatgagccctgacacatgaaagcccccaatggcccacaaggcttttcctttcctcgatgtctgatttttcacaactgtcctgcaaggctcagaggacagaaagtattatcttgtttgtttgtttcacagataaggaaacccagttcagaggggtaaagactcccccaaggccccagctggagccatcactgatgagcgcctactcagtgccagcttctgcatgagaccctttgcctcctgtgagcctcacaacagccctgtggagtcagcatttccatctcctttttaggtgaggttcacatcaaggaaggggctggtgcaccctctgaatccctgcagagcccgtgttttttgctcgacatcatgctgccccccgctccaccccaacacacctgacaatggcatactagagatgctcctcccgtcgtttcgtccctgcccacaccttattagaggccctgccatatccacagccccagaaagttattctccccactgatattcggtggctccagctttctgaccatagcattcaggaactgggacggactttgacccaagctgggccaatcagaatctctcttccaggcatctcaacaatccattgaaagacagagaagcagtggcttcaggacccacaaggtagggcaggctaggggcagagaggaggaaggagcaaggctgcctacctgggcattggcaacgtgccgtaagcaagcccctctgcatcatgggctggactggtgtgcagagagaggttgagatgagcagcactgtggctccagaggggagctgccagacacccgcccaggtccagtggcccagcaaggcttctactcagcaggctccatgagagtacactgaagcctttcaaatatagcccttttatacttgttcttttttttttttttttttttttttttttttttttttttttttttgaggcagagtcttgctgtgtcacctaggctggaatgcagtgtggtgcaatctcggctcactgcaacctccacctcctgggttcaagcaattctccctgcctcagcctcctgagtagctgggattacaggcacccaccaccatgtctggctaatttttgtttttttaatagagactgggtttcgccatgttagccaggctggtctcgaactcctgacctcaggtgatccacctgccttggcctctcgaagtgctgggattacaggcgtgcaccaccacgcccggacttgttccttcttttttgttgtttttgggggttttggtgggtttttttgagacagggtctcgctctgttgcccaggctggagtgcagtggtgcaaccactgctcactgcagcctcgacttcccgggctcaagcgatcttcctgcttcagcatcccaagttgctgggaccacaggcgcacaccaccatgcctggctaatttcttttttgtagaggtggcggtctcactttgttgcccaggctggtcttgaactcctggcctcaagccgtcctcccgtctcagcttcccaaagtgctggaatcacaggtggtagccactgagcctggcccttgctcctctttttgagggttttcatgcccaacaacctgggagcatccacccagctcaaccttggggctcttgtctataccctgatcctcaaagtccattcagtgagtcctttctaagcacctgcttcccagtgtcctttgctgctctccctaaacatcagcattcctcagggctctgtcctggccactcttctcagacacattccccttctcattcctctcccccaatttctcccctggcagcagctactgtctctatgctgagagcccccaacactctcactctctctctctctctttctctccctttccaagccaggcctctcccttaagcttcagacctgcaagtctacctgggtgtcccagaggccccctgaatgctagatgagcaaaaccaggttcatcaccttgctccaagcctgcccttccacctcagtgcttctccatctcagtcagtggtacctcagactctgggttacccaggtcagacacccagcagtgactcaggactctctcctccttcccactcatccccaacactcacaggtctcaacagacttccagtattcaaaaactattttcagcaaaggagtccctcatgtcattgaggagtgagtgaagttctgacacatgtagaagctgaaagaggtttcacttcagtgaatataatttgcaccaaggtgagaaacagtttaacagtagtttgcatatcagatttaaagataataaattggccaggtgcagtggctcacaccagtaatcccagcactttgggaggctaaggcgggtggatcacctgaggtcaggagatatagaccagcctggccaacacgatgaaacctcgtctctactaaaaatacaaaaatgagctgtgtgtagttgtgcatgcctgtaatcccagctacttgggaggctgaagcaggagaatcacttgaacctgggagacggaggttgcagtgagccgagatcatgtcactgcactccagcctgggtgacaagaatgaaactctgtctcaaaataaataaataaataaataaataataaaggtaataaacttacggggaaaagagcagattgggatgtgactccatttgttacatcacagctaagctgcaaccacagattgacaatggatacaagaggtcagcaaaaatcagcacaagtatcctatggggatcaattggccatatggagttcacaatcaagagttctgaacatattttattatcactgtaaatgctgtgctacacttttttatatgactggaattataataactcatacatttattgttctggaaagctggctgttaaatatctaccagcacaccaccacacccagcaatgtgctccatggtcaggcacttttgtaaaattagaaatgatatgatctttctgtgtcctttttctttaaaagggctctacaaatgatacgtataagattcagccacacaaaatctggaccgggccccagagaaagctctttgtcaaccgaaacactaggtgacatggggacaatggagatggttggtgttggagatagacctgagcggagggaggaagagcaggagtccgggggaggagggggagactcgagcctggggcccctaggagacgggtggttatgtttacaaagggagtaacgagggcttttgctgggaggatggcctgaagaaccagaagccctgcgggacaggtgcggggcaggctccaggtccctcccagacacgcactcaccttctcgtagtatcggatctcgtactccgtgtcattggccccaggggctccggcagggatgggctcccgccacgacagggacacgctctggggttccactcggtccctgcggatctcatcctcctcccagggcgctgaaagtaagttacgtgggattctccaccttgacccacctcacggcagggctgggggtgcggggaagagggtgcggcgtgcggggctgtgggaccggactagagaggcctggggcgtggtctaacgggctgtgggcggggctagggaactgactgagaggcatggccaaaggagaggagtctgtgggaccagaggaaagaagcacctctgcccccacagcccttttcttcattgtcccatagagggaaaagcattaggccttctgctgcttgcccaccccttacagcccagcttctctcatggtggtcggctctaatcctccaggctctttctatacttgctgcagcttggagacataagagagcatttagaggcagaaggacctgcttcttaacgattccaatggtctggtcaagaggtaatacactcaacaaactagaaatagaaggaaattatcccaaaagaataaaggccatatatgaaaagcctacagtgagcatcatacccaatggtgaaagactggaagccttccctccaacatcaggaaaaaggtaagatgtctgctgtcatcacttttattcatcataataccagaagttctagccagagcagttaggcaagaaaaagaaataaaaggcatccaaactggaaaagaagcaggaaatttatctctgtttacagatgacatgatcttatatgtagaaaaccctaaagattccacacacaaaattgttaggccaggcgtggtggctcacgcctataatcccagcacattcggaggctgaggcaggtggttcatgaggtcaagagatcaagaccagccgggcaggtggatcacttgacgtcaggtcgaggcaggtggaccacttgaggccaggagttcgagaccagcctgatcaaatggtgaaaccctgtctctgctaaagaaatgcaaaattagccaggcatggtggtacatgcctgtaatcccagctacttgggaggctgaggaagaagatcagttgaacccgggaggtggaggttgcagtgagctgaggtcgtgccattgcactccagcctgggcaacaaaagcaaaattctgtctcaaaaaaaaaaaaaaaaaaaaaaagagattgagaccatcctggccaacatggtgaaaccccgtctctactaaaaatacaaaaatgagttgggcatggtggtgcgcgcctgtagtcccagctacttgggaggctgaggcaggggaatcacttgaacctgggaggcagaggttacagtgagccgagatcgcgccactgcactccaacctgggcaacagagcaagactccatctcaaaaaaataaaataaaatttagaattaataaacaaaatacagcaaagttgcaaaatacaaaaccaatgcacaaaaatttgttgtgttcttatacacaatgaacaattcaaaaaggaaattaggaaaacaatcccacttacgatagcatcaaaaataataaaatacttagacataaacttaaccaaagggatgaaagacttttatacagaaaactataaaatattgctgaaagaaatgaaataaaacacaaataattggaaaggcatcctgtgttcatggaatagaacacttaatactgttaaaatgtctctactaccaaaagtgatctacagatttaatgcaatcctatcaaaatcccaggcattttttgcagaaatagaaaaaacatcctaaaattcatatggaatctaaaaggaccatgaatagtcaacacaatcatgggaaggaaaaataaaggtgggccagaggcagtggctcacacctgtaatcccagcactttgagaggccaaggtgagagaatcacttgaggccagcattttgagaccagcctgggcaacacagtgagactccatcatttacaaaaaccaaccaacaacaaaacctacacacacacacactcacacacaaaaggtagagtcctcacacttccttacttcaaaacatatttcaaagctacagtaatcaaagcaatatggtacagacatatagaccaatgaaacagaatacagagcccagaaataactcctctccatgtatggtcaaatgatctcccacaagggtaccaaggttatgctatgcagaaaggatagtctcttcaccaaatggcactgagaaaagtggatatccacctgcaaatgaatgaagttggaccctcacctaaaatcatatgcaaaaaatgaactcaaagtggattaaagacctaaatgtaggatctgaaatgataaaactcctagaagaaaacacaggggaaaagattcatgacactggattcagcaatgatttcttggatatgacaccaaaagcacaggcagcaaaaacgaaaatagacaaatgagactacatcaaactttaaaacttctgcagggcaaaggcaacaataatcagagtgaaaaagcagtctttgaaatgggagaaaatgcttgctaaccatttatctaaggggttaatatccagaatgtataaagaatgtctagaactcaacaacaaagaccaaataactgtaggctttttttttttttttttttttttttttgctatcaagcgaggcagtgggagtggagatgaacaaagaaatctataactggttgtgatcagttagttgtaaacaatactgcactcagaccagcttgagtagacatttcttcaaaaaagatatataggctgagcgcggtggctcttgcctgtaatcccagcacttggagaggccgagggggcagatcacctgaagtcaagagattgagaccagcctggccaacatggtgaagccccgtctgtactaaaaatacaaaagttagctgggcgtggtggcatgcatctgtaatcccagctactccagaggctgaggcacaagaattgtttgaacctgggaggcagaggttgcagtgagctgagatcgcaccactgcactccagcgtgggcaacagagtgagactctgtctcaaaaaaaaagatatacaaaaggccaagaagcacatgaaaagatgcttaatatcattaatcatcagggaaatcaaaatcaaaatcacaatgagatatcacctcacaccctttaggatgaccactaccaaaaatatgggacataacaagtgttggcaaggacatgaaaaaattggaacccttgtacaccattgtgtaggaatgtaaattggtgcagctgctatggaaaacaatatggaggttccttaaaaaattataattactatatgatccagcaatcctgtttctgggcatatatccaaaggaactgaaatcaggtcttgaagagatactgctcacccatgttcattgcagcattattcacaacagccaagaggtggaagcaacctaaatgtccataagtggataaatggataaagaaaatatggtgtatactccatggaatactatgcagccataaaaaaaggatgagttcatgtcctttgcagggacatggatgaagctggaaaccatcattctaagcaaactgtcacaaggacagaaaaccaaacaccgcatgttctcactcataggtgggagttttacaatgagatcacttggacacagggcagggaacatcacacaccggggcctgtcgcggggtggagggtagggggagggatagcagtaggagaaatacctaatgtaaacgacgagttgatgggtgcaacaaaccaacatggcacttgtatacctatgtaacaaacctgcacgctgtgtacatgtaccctagaacttaaagtataataataaaaaagagttaaaaaaaagaaaagaaaaaagaatatatggtgtaaacatacaacaggatattagtccttaaaaagaagaaaattctgttatatgctacaatatgaatgaacctcgaagacactatgctaagtgaaacaattcgtcacaaaaagacaaatactgcatgattccacttatgtgaggtatctaaagtagtcaaactctttgaaacagaaagtagaatagtaggccaggtgcagtgactcatgcttataatctcagtgactcacacctgtaaacccagtacactttggtaggccaaggccagtagatcacttgaggccaggaattcaagaccagcctggctaatgtagtgaaaccctgtctctactaaaattacagaaattaaccaggcctggtggtgtgtgcctataatctcagctacttgggaggctgaggcaggagaatcacttgaacccaggaagtggaggttgcagtgagccaagattacaccagtgccctctagcctggttgatagagtgagaccctgtctcaaaaaaaaaaaaaaaaaaaaaaaggaagtagaatggtagttgccaggggagggtggtgggggtaaaggggagttgttgactggatacagaatttcagctttgcaagatgaaaaagttctacaccccaggtattggagttcatgcctgtaatctcagcactttgggagggccagggtgggaggatcgcttgagcccaggagttcaacaccagcctggacaacaaagtgagaccctgtctctacaaaaaatcaaacaattagctgggcatggtgtcacacacctgtggtcccagacacgtgggaggctgagacaggaggcttgcccaagaccagaaggtcaaggctgccactgcactccagcctaagcaatacagcaagacccagtctcaaaaaaaataaataaataaaaataaaggaaaaaaattatatcctttggacaacgtatctagttaacattactgtactatacatgtgaaatgggttaagatgatacattttatgtgttttttacagtaaaaaaaatgttgcccaggtcacaacccagagcaaacaaatcatcatctctgtaggctggagctcagggattagttgcttttattttattttattatttatttatttatttgtttattttttgagacagagtctcactctgtcacccaggctggagagcaggggcgggatctcggctcactgcaagctccacttcccaggttcacgccattctcctgcctcagcctcccgagtagctgggactacaggtgcccgccaccacgcccagctaattttttgtatttttagtagagacggggtttcaccatgttagccaggatggtctccatctcctgacctcatgatccgcccaccccggcctcccaaagtgctgggattacgggcgtgagccaccgtgcccagccagttgctttattttttaagtttcttggtgattccagcgtgcagacaagtttgagaaccgccagtctggatgatgtcagatgaacagcagcatacacacacatacacacatatacgggagataataaggcctggggttagtgttcggcaaaggggtttccaagagaagatgccaggagggcagtgggagaaatggttccagggctcagaaaaggtgtctgggagaaaaatggagatgcaggagccatgataaggtgaagggatgaaactgtccagggaaaacgcataaaaagagaagaggaaaagcttttagggaataagcctgagacacgccaacaattaagaaacaggcaaaggaagagaagcttgacaaggaggagccagagaggcaggaggaagaccaagggtgggcaaggtgatggaagcccagggaagagaacatttaggaaggttccctcctgacttttccagtggttagcccactattggtccacaagcaagtgatcttactccctgagcctcagtttccccgtgtgtaaaatgagaacaatgatgacacctcctaggcttgctgtgggaattttatgaagtaatgtgttatgagggactgagcgagtgctcagcaccagcattccagcaagaggagctggcgctgggccatgtcttacgctgagaggagacaacagagtaagatgatgattcaaacttcccactggctttcataaagtggacgttcccggtgccttcaggggattgaggaaagtaccgatcagatagtaataaagcaagaaagtggaaacggagtaggtggctcaggctctgacaagtgcgtggatgtggcttctagtcttaaatggtatatatatctagcagcctccactccatgtctttcccaaattccaattaaaacataaagacacagtaagagttgaaaacctacaccatcaccataaactagtcttgacagctgatcgccagaatgggggctggagagtagagtggcacatttctacttatgatcaaggcagtgggactagatcaaaaagtgcaattgtaatgaacccctaggctacactgcccacagagtggcattgcctcccattctaaaaataactcaaaaaaatcctttattcctcccttcagtgtctgaccctttaaaaaaaaaaaaaagccaagtctttgtcaagtggacaatgcacagccagcactctactgcagagctgctttcgaggaagagtgctcttccctatcccccgggggcgcttctcagccaaaattcactttgagacggcagctcccagaaaaggcctgagcacaaaggcgagaggagtgatgaagcattctaggaggtggcaaagttccttgcgaatacagatggggcagagatggaaaaggaggctagaaatgtccatttttgagctacatttgtggaaagcatcagatggccaggatagagaggtagaagatggttccatctcagctccgaagagataattagatgaaagcctgataaatcctgctagtggagctaaaaactaacaccaagcaccggctctccagctgtagatttgggatgggaatcagccagcacccaagtggggccaaagttacagcagatagtactggaaacctagtcaacagccttgtccccctttcctgctagctgagctgaatttttggttcatagtctactgtctccccataggtgacttgggtaacttctggctgttctaagacatttgtgtgcactcattccctttgccagtgaatggtttagggttgggcttacaatccagttctggccaacaaaagaagttagctggggacaggggattcagagaaaagtttcttgcttttaaaaagatacctgcaaggaagaaacagttctttttctgcctctgaatggtaaggatgtgatgtctggagctgctgcagccaccttgctaccatgagggaaccagcctatgtgatgagaatggcagagtggacagacagaaaaaacctaggtccttgaggacacttttgagctgctgaatgaaccaagctttaactctagccctcttatgtgagctaagaaatcatttaagttaaagtcagttagggcccagcactgtggctcatgcctataatcccagagctttgagaggcatagatgggggtcttgcttgaggccaggagttagagaccagcctgggcaacatagcaatactccgtctctacaaaacaatttaaaaagaaaaaaaagttagctaggcatgttggcatgcctgcagtcctagccacttgggaggctcaggcgggaggatcacctgaccccaggaatttgaggttacagtgagcctatgatcatgccactgcactccagcctgagtgacagagtaagaccttgtctctaataataataatataataataataataaaataaaatcagttagactgagatttattgttacttgcagctgaaaacctcataactaattcaaagggcaattcacgcatcttttttgttgttgttgacaaacaccagctatttccttactcaagaacaagtaaacagaaaataccagaaattgggtatatgaaaaaatatttcagaataagagaataggaacattattctgaagactcaggagaagtagatcttgaaaagtgatttaatatgatagagagtaagtaaaacgctctggcactttaagaagaaagaaaacacagcctccaccaactatgtacagaaggtcataaggagaaaacaggtggagaagaaaaagaaacgagatgagataaaaatggagaaactgagaagggctgggtgaagaaactaaaagtgcatcagcaaaattgaaatatttaaaataaaattcattacaaatacaaggaattttaacaaaatcacaaacagaatgcaaaatgaacccctctcagtctttggaacatcaagtaaaaaataagaaggaaccacaactgaataataactcgtgatggtttaactgatgattgttttaccatggtgtaaaagcaatacaaccattctatttttgcactttcagtacagtgttcaataaattacatgatactcagtgtaaaatactcattgtaaaataggtgatttcgcccacctgtaggctaatgtaagtgttctgggcatgtttaaagtaggctaggctaaggtatgatatctggcaggctaggtgcattaaatgcatttttgacttataatattttcaacttataataagcccaatgggacataagcccgtcattaagttgaggaacatctgtgtatatatagatagatatagatatataaagacagagagagaaagaactacaccataaaatagtgcacattgttttaaagtagccatgaaatagtttaaaaatttttaccacgtacaaacctccatgaagcactacaatcagcaacgtaaagacaaacaaaataaaagcaagtcatctggaaataaaagcacatcctctaaaataatttgattcaaaactacaacactaaaagaaaacacagaaatgttaaccttggactaagcaatggtttcttagcgatgacaccaaaagcacaagcaaccaaagaagaaataaataaatttgacttcatcaaaattaaaagcttttggccgggcacagtggttcactcctgtaatcccagccctttgggaggctgaggcgggtggatcacgaggtcaggagttcgagaccagcctggccaacatggtaaaactgtctcaactaaaaatacaaaaaaaaaaaaaaattagctgggtgcgtcagtgtgtgcctgtaatcccagctactcgggaggctgaggcaggagaaccatttgaacccaggaggcacaggttgcagtgagcagagatcatgccactgcactccagcccatctaaaaaaaaaaaaatagctggatgtggtggtgtgcacctgtagtcccagctactctggaggctgaggcaggagaatcgcttgaacccaggaggtagaggttgcagtgagccaagattgcaccactgtacgccaccctgggcaacagagcaagactccatcttggggaaaaaaaaaaagaaactaaaagcttttgtgattgaaaggctattctcaataaagtgaaagccaaaccacagagtgggagaaaatattcacaaatcatgtatctgacaaggtttgtatgggttaaattgtgtctccaaaaaagatatgttgaagtcccaaccaccacttcccatctcagaatgtgatcttatttttacagaggtaatcaagttaaaatgaggtcattagtgtgggccctaatccaatatgactggcatcttcatgaaaagaagaatttgaacacagagaaaaacacctagagagatgatgatgtgaagacacagggagaagacagccatgtgactagagtgatgcgtctgcgagccaaggaacaccaaggattgccaggaaacataagaagctgaaaggcagggaagggtcctcctctagaatcatcagaggcagcgtggctctgacgacaccttgattttgcaatacatttgttttaggccagccagttttttggcaccttgttagagcaaccctgggaaatgaacacaagggtctagtgtctgtaatacatatctatagttataatataacttaatgacaaaaagaaaaccctgcacaggaaaagatgttcaatatcattagttattagggaaatgcaaatcaaagccacaatgagatattacctcacatctgctaggatggctactgtttaaaagacaaacaataacaagtattggtgaggaggcagagaaacttggacccttgtactttgcaggtaggaatgcaaaatggtagagctgctttgaaaaagttggtaattcctcaaaaagttaaaaagttattatatgtattagtcagctcaggttaccataaaaagaaaccacagacctttaataacaaaggtggctttcaagccaggcatggtggctcatacctgtaatctcagcattttgggtggccaaggtaggtggatcacctgaggccaggagtttgaaaccaacctggccaatatggggaaaccctgtctctgctaaaaaatacaaatattagccaggcgtggtggcacgcacctataatcccagctacttggcaagctgaggcttgagaattgcttgaacctgggaagcggaggttgcagtgagctgagatcgcaccactgcactccagcctgggtgacagaggaagactgtctcaaaaaatacataaataaataacaaaggtggctttcctaacaaaagccacctttggctttcataacaaaaatttattttctcacacttctggaggctagaagtcccaggtcaagaggtcagcagatctgtaatccggtaagagctgttttcctgaccagccaccttcccactgtattctcacgtggcctttcctctgtgcacatatggacaaagagtgagtgagctgtggtgtctctcccttttcttttcttttcttttttttttttttttgagatggagtttcgctcttgttgcccatgttggaacgcaatggcacgacctcggtttaccgcaacctccacctcccaggttcaagcaattctcctacctcagcctcccgagtagctgggattacaggcatgcaccaccatgcccagctaatcttgtatttttagtagagatggggtttctccatgttgaggctggtctcgaactcctgacctcaggtgatccacccacttcggcctcccaaagtcctgggattacaggcgtgagccaccacaccgggtagtgtctctcccttttcttatagagataccagtcctaatggattagggcccacccttatatctcatttaaccttaattacctccttaaagagactctctccaaatatagtcacattggggtttagggttttaacacatgaatctggaggtaacataattcagtccataaccatatgacttagcaattctactcctaggtatatagccatgaaaactgaaaatatatgtttatgcaaaaacatatattcattaatgtattatgaatacattaatattcataatagtattattcataatagccaaaatgtggaaacagcccaatgtctatcaactgatgaatggataagcaaaattgtggtctatccatgcaatggaatgtcattcagccataaaaaggaatgaagtactgatacgtgctacaatatggatgaaacttgaagccattatgctaagtgagagaagccagacatgcaagttcacatattgtataattccatgtattgagatgccaagaagaggcaaatccatagaaacagaaagacctagttgttaccaagagctagaggaggtggatggaatggtgagtgactaatgggtttcctttcagggtgatgaaatgttttagaattagatagcacttgttgcacaactatgcggatatatgaaaaatcactgaaccgtatacttcaaaagggtgaattttatgttacatgaattatacctaaaaaaaccttataatactaacaatgtgataatatcatgtatcaaatgtattggaagtgacaaagctatattcagaggaaaactcatagctttaaaaaatttaaacaaaaaataactaagcactgaacttgcctagaaaaagacttcagaggttgggtggggtggctcacacctgtaatcccaaaactttgggaggccaaggcaggtagattgcttgagtccaggagttcaagacaagtttgggcaacatagtgagacccccatctctacaaaaaacacaacattagccaggcgtagtggtgtgcacctgtaatctcagctacttgggaggctgaggcaggagaatcgcttgaactcaggaggcagaggttgcagtgagccaagatcatgccactgcactccagcatgtgtgacaggcagagtgaaactgtctcaaaaaaaaaaaaaaaaaacttcaggaaagcaggagagtggtattaataaagataaaatcataaaatatagccgggcatgctgacgtgcacctgtaatcacagctacttgggaggctgaggcagcagaatcactggaacctgggagccagaggttgcaatgagctgagatggtgccactgcactccagcctgggcaacagagtgagactccatctcaaaaataataataataataaatcataaaataagtgacgaaagtaaagaacaatggaattgataggttcaagagctgattctgtgtcataaccagtaaaattaacttctggcaaggataattaagaaaaaagacagaaatcacaagcatacaacaggaagaaagagaaagtgaagttaactccaggtactgaggaaatgtatatacatttctaataataaattagaaaaagaacaccaaaatattttctaggaaagcacaaatttataaaactgatcaagacgttacagtaaagattaaaaatatcaaaccaccaggtgcagtgcctcacgcctgtaatcccagcactttgggaagccaaggcaggcagatcatctgaggtcaggagttcaagaccagcctgatcaacgtggtgaaatcccatgtttactaaaaatacaaaaattagctgggcgtggtggtggttgcctataatcccagttacttgggaggctgaggcagcagaatcactggaacctgggaggtagaggttgcagtgagctgagatggtgccattgcattccagcctgggcgacagagactccatctcaaataaataaataaacaaataaataaaactttctctccaaaaatggcatagaacccagaaagtttcccaggcagttttttatgccttcaaagaatatgtaaatgtgttgttaaaactgtcccagagcagagaaaaagaagaaatttttccagatacctttaccaaagccagcatccccatagtgccaaaacttgacaaagaacacattacaaaacactaatctctcttagaaatgtagatgggaaaaatcttaaaatataagcaaatgaactcagcaaaacatccaaagaataatatatctagtagggtataatccaggagtgcagagagttcacactgaaatatccattaatagaattcatcataccgacaggtcaaaaaggaaaaaatttggtcatattgaaaatgcttaataagcattttataaaattaacatccatttctgatttttagaaaaagttcaatgaagcattatatggcctagggattaaaggcacagggctttgaggtcagacagacctgggttccaaaaccaatctaagatgagtttcctttcttttcatcttttttttttttttttttttttgaggtggagtcttgctctgtcacccaggctggagtgcagtggcacgatctcagctcactgcaacctccacctccagggttcaagagattctcctgcctcagcctccccagtagctaggattacaggtgtgcaccaccacgcctggctaattttttttatttttagtagagacggggtttcaccatgttggccaggctggctcaaactcctgacctcaaacgatccacctgcctcggcctcccaaagtgctgggattacaggcgtgagccactgtgcccagccccgtttcaatgaattaatgtagaaaatcatattgcacagtgccaaatacagcagcactagatcagtggaagcttagtatttttattgagaaaatggaaatagaagagtatttccttaacatggcttctaaatctatctgtgtcaaaacagttaagattgttaacataaggccgtgcacggtggctcacgcctgtaatcccagcactttgggaggctgaggcgggtggatcacctgacgtcaagagttcgagaccagcctggccaacatggcgaaaccctgtctctactaaaaatacaaaaattagccggttgtggtggtgtgtgcctgtaataccagctactcaggaggctgaggcaggagagtcgcttcaacccaggaggcggaggttgcagtgagccaagactgagccattgcattccagcctgggtgatagagcaagactccgtctcaaaaaaaaaaaaaagattgttaatgtaaaatgccagataaaagttagtattacatataccatcatgcattgctaaatgatgggaagatgttctcagaaatgcgttgttaggtgatttcattgttatacaaacatcagagtgtacttacacaaacctagacagcatagcctatgacacgcctaggctacaacctgtacagcctgggtgacagcatgtgactgtactgaatactacaggcaactgtaacagaaagtactaagtgacaggagtctttcagctccgttataatcttacaggatcaccatcatatatgccatccattgttgaccaaaatgtctttatatggtgcatgactgtattaaaacaaaagggattttataggtagatagttacaaatatgaatacagagatcaagatagacaggaaaaattttctggacgtatatactctaagatattaatagttgtttttatctatgtaataagattatgggttttttcttcttctatactgaatttttaaaaatgtgatccttttgtagtttgcaagtgtgatgattggggattcacactcgtatgtgagatgtgtcacccccgaaccttttcacgttggcaaaatacccatctgacatgaaagaaagatggaaaaaaagaatttttaaagatgtaaatgcaatagcaaatgttaaatcacaatagagacaataaaaaacagtactgttccagaaacccagacaagctggaaaatctccaaaaggcagtggaaatggattaagagctcaaaaggataagggaagtgacaagatttgagaatcagaaaatgaatgtaaaacctaaggcttagagatatttttaagagatatatttgagctatcagaagttctagtcaaagcagtggctgaataaaactttttttttttttttaagagacatagtctggctctgtcacccaggctggagtgcagtggcacaattatcactcgctgcagcctcaaactcctgggctcaactgatcctcctccttcaccctcctgagcacctggtactacaggcacacatcaccatgcctggctaatttttaaaattttttgtagagacagggtctcactatattgctcctggcctcaggctcccaaagtgctcagactaagggcatgagccactgttcccggcctgaagaaaacttttcccgggaaaaaaaaaagttgtgcaaatcaaaaggtttactcaatcaaaagaaatccatattggtagccgggcgcagtggctcacgcctgtaatcccagcactttgggaggccaaggaggacagatcacgagctcaggagatcgagaccatcctggctaacatggtgaaaccctgtctctactaaaaatacaaaaaattagccgggtgtggctgcatgcccctgtagtcccagttactcaggaggctgaggcaggagaatggcgtgaaccccagacgcggagcttgtagtgagccaagatcgccactgcactccagcctgggcaacagagcgagactcctctcaaaaaaaaaaaaaaaagaaagaaagaaagaaaaagaaaaagaaaaaaaaaaaagaaatccatattggttaaatgattattttcagcctggcatgaggtggctcatgcctgtaatcccagcactttgggaggccaaggcgggtagatgacttgaggtcaggagtttgacaccagcctggccaatatggtgagaccccatctctactaaaaatacaaaacttagctgggtgtggtggtgcgcacctgtaatcccagctactcgggaggctgaggcaggagaatcacttgaacccaggaggcagaggttgccatgaactgtgatcacaccaccacactccagcctgggtgacgagcaaaactccatttcaaaaaaaaaaaaaagaaagtctggctaggcgcgcagtggctcacgtctgtaatcccagcactttggaagcctgaggccagcagatcatgaggttgagagttggagaccatcctggccaacatggtgaaaccccgtctctactaaaaaatacaaaaattagctgggcgtggtggcatgcacctgtagtcccagctactcgggaggctaaggcaggagaatcacttgaactcgggaggcagaggttgcagtgaatcaagatcgcgccactgcactccagcctggtgacagagcaagactctgtctcaaaaaaaaaaaaaattattatcaacagtaggttaagcaggttaaagaattattctaacatccgtgtgcatacgtgtacatgtcatatgtccaagttaagtagaaaagaatgaaaataaccctagcctcagacttcttggcaacaccactgccaaagacagaagcgggatcacagaaagcagggatgcagggtgacaggccgaccctataggctcgattaggaagggagtcagaaaccataccactcgcttatctttcttgcaaagaatacaagcattacttgaaggtccaccccagctgagaagcgaatcaaaagaaactctcaggaatgaaggtgtggtgtgaaaaggttgtaggtcttcacttattcacctcatgtccagactcagagatgtattggctggtgtgttccatcgcccctacagcctaactctacaagcttccttgccctttcccgggaccaggaaaggaggtggccagatgcagcaaaaccatgcagaggccgagggttggaggtaagggacacagggccggatccggcttcccgagacagagggaaggaagtaaattcggattcctactgacatttttttaaagggaaggtaagagattaagggactttccacctctttttccctgagaaatcagcggcgaggccaactgcagagccgtgagcgggacagaggctttgtgcaaggagtccaggagaaaagcgagcacacaggtgcttcccgcagacgcaacagaaccgcgcgcctcccctctggcccagtagtaaggggacgcctgcatcctcagtccctctcgcacactcgggagggcgactgacgctggggcgtccgggggggtgactttgtgtcccggagaggggcggggtgcgtgtacagaggatggcttctctggggtgggtgggtggggctcccgcaggaccgacggggcggccccaagagggcgcaggggcggcaggcgcggtggcctcggggtggggggcgcggacggccttacccccgggcccggtggagacggtgacctgcgcgtaggtggttcccgcggcggccgccgggcccgagacgccgttgagcgcggccacgcgcacggtgtagcgcgcgccgggccgcaggtgcagcagcgtggcggctcgctcccgcagccctgcctggcgcggtaggaaggccacgcgcggcccgcacggctcgcaggcgcccgccgggccctcgcggccgcagcgcaggcacagcagcgagtaggtgacgtccgagcggcctcccgagtcggccggcggcagccagcgcagtcgcagcaccagcggcgagcggctcaggctgtactgcaggtcccgcggcgccgacggcggccctgaggcggcacaggggcggggcggtcagggcggggcgtgggtgcccgtgagaggggcgggatgcacgaggggggggcggggtcttgtccacccccagtgaggcaggagaagcaggggcgcgagggtcagtcggggaggagggaaccagggcgttcatcaagggacttggtggatgaggggggacgggggacaggagagacagtggcatggggtcagtcagggaggaaggtagaagggacgaccggtgaaggaacagggatggatgagcgggaatgggccgtgggagccagtgggcatgggggataggaaggtgtgaggggtctggggtgggaggaatgggggcgtggggttcagtcagggagattggtacagagatggtcagtcagtgaggggtcgagggcggatgagcccggggcaagcgggagcaggggcgagcgggagcaggggtgagtgggagcaggggcgagcgggagcaggggtgagtgggagcaggggcgagcgggaggaggggcttgccccgggaagggtcagagacgggggcgtgggggcccttgggaggtcggaatgtgagagtggcggggcagttggtgaggatttgggaggaggttagtgaggaaccgaggatggcagcatggggaccgaaccgatggtgcgaaggtcgggagcccccctttcggctggagggtaggcagggtgaggagagggcagcggaggggcgctctcctcagtgatctgccaggcatcctaaccccatcctccgtctggactctcgcagttgtcctggttcttctcatcaaaggccccggcccccagggcgcgtccaggctccgctcccccgtacgccgccttccggggcgctggcccccatatccgcccacgtgcgccccagtgcggagaccctgccctcaccaccacctggatcaggccttccttcttggccactcccaccccccaccctccgcagtgcagcctggaggggggactcacgggtgcaggaagccgagggcgggtcggtgggtgagcgcgcatagctgtcctggcacacgcagaaggtggaggcgttttccagggcccggctgtgctctgggcacggtgagcagaggggccgccgcggggacaccttgtaaaaccctgggggacaggctgcagggcatggctggtgagaagagggggctcctccagtttctccccgctttcctgactggcctggttagggcagcgtttatctcctccaattgcgatagaaaaacagtcaggggactcagccactccagtcagcactgccccgtggagtgactcctgaacaacccattacctacccttagaaaacgctgtgtgttcggaaaactttgaaacattttactttcagccgggcgcggtggctcatgcctgtaatcccagcactttggaaggccaaagctggagatcacttgagcccaggagttggagaccagcctggacaacatggccaaaccccgtctctatttattattttttaaattacgtctattaattcattgaatcctcacaaccacctgtgaggttatatactttatcctctttttattttatttattttttcttttttcttttcgagtctccttctatcacccaggctggagtgcagtggcgggatctccactcactgcaacccccacctcccaggtttaagcgattctcctgcctcagcctcctgagtagctgggattacaagtgtgcaccaccatgcccagttactttttttgtatttttagtagagatggagtttcaccatgctgaccaggctggtctcgaactcctggcctcaagtgatctgcccagcttggtctcccaaagtgccaaaattgcaggcgtgagccactgtgcccgaccctttatcctctttaaaatgagggagctaaggctaggagaggtgaagttgcctacagctactctcccgcagcctgtgggatcccaacccaagcccacatcacaccaccctcaggaccactggaagaaaataagtcaaactctgcagtgctggtgtgagaaagagaggggaggagaggtgccccaagagctgttccacagttacgcagggacagacacacaagcatacatgcacacacacacacacaccctcccaccaccaccatcatgtgagtgagtgtgtcataaattcccaactggaagtaaagccagccaggtggaggggggtgggtggagagaaaagggccagtaaaagttccctggaccatgagtcagacctggttccagtcttgacacctactcagtttgcttctctcacttctcagaacacaggttgttaagatcacaagtgtttctatctgaacaacctgggtttgtagctgagtcaccccacttatttgctgtgtggccttgagcacatcagttgacccctctgagccttgtgttgaatacctacctcaaaaaggttgttggaggattgagataaaacatgtaaaccacctagcccagtaccaaccacattttcacaataatgatagtaattactgttcctcccccacaggccttaagtggtaactgctaaacacccactttaaaaaaatttctcaccagctgggccagttggttcctggccctacctctcagaacttgggtggtcctcaccttgttccctggccctctcctctagtttagctggctgctctccagctccaagaagacgcagtacaacagaaagggtgcagactagccctcaggaggaactttcagcctgtgtggcagaagaggggaggggactaggatttccactgtctggaaggcataggtttgagagggtccatcttgcccagagttctgggcagcacaactctggggaggggctcggcagcccaggagccttcagaagtctcctctgcctgcagaacagagcatgggccaactatccccgtggtctggtgggcagcagagacccaggctgggacttggaaagcttgggttctagtgttggctgggccactccttgtgcctctctggcctcaaaaaaagcattggtcaaataggaataacaaccatgccctgcccaccactgttgtgaaataggagagcaagtgagagcccagataaatgatctgttcgcagggtttcacaaaaataggggaagaatgctggaggctccctccccacaagtgtatgagggtggctgctgtcctagaggtgggtgggcccatcagcgaccacagtggtatctctgctgtaagaggctctgcttagaaggagtttgtgctgaagagcagattcagggattcctgactgccagcccctccctctcttcaaggtcagaccttcagagataatctagctcagctcccactggcctggtcctccggcagcttccccagcagtagccacagtctttgtcacatactttatcatgaggcattcacccgcttctgaggctgcctttgttgaacaatgctggcagaaagtgcttcttaggatgagcccccattagcttcgctgtctgtaatgccccttgtgccaccccatcacaggggctcattgtgccctatggagcctcagagaacatatctgcttgggtcccttggctccaaggcaatcccactgagttgttttgtttgtttgtttctttgtgacagggtcttgctctgttgcccaggctggagtgcagtggcacaatcatagctcactacagcccctgcctcctggggccaagcaatcctcccacctcagccctcccaagtagctggaaccacaggcatgctgtgcaaccatgcctggctaattttttgtgtgtggagagatgggatctccctgtgttgcccaggctgatcttgaactcctggctcaagcaatcctcctgccttagcctcccaaattgctgggattacaggtgtgagccactgcacctggccctagcagagaattaaagctacttgttatatgccctgattttttcccccaaaggaaaccccagctcttttactaatttctctagtggctaaccgagggagaacaaaagtcaaggtcactaaagagaaacaaaaaggggaaaagaacatattcgttctattcccccacttatccatctacttttagagggaagcttgtgttagctgcagaaggcacttggaaggccttaactttctaaatgcaaatccaatcatttcccttcccttcctaatgtcctccaacagctccccactgccagccactctaaccatggtacactgagctcatcctttcacacctctgggtcttgttctgtaattccttatatcctttttctcctggcaaacttctatacttctccaaaccccagttcaaataacatctcccttgtgaagctttccttggcattgtccccagctccccactccccaaggcagagctgaggccattacaaatggcctttttctgttctcatcagacatggtttgggttcctgagtctctttctctctctctctctttctccctcatttcccagagaaacctcctcctctcactcctgatccattcattcagcaaatattttttggcatctactaggtaggctctatagatacacaacaatgaataaaacagacaaggaccttactgtccatttgtacagatgccctccctcccaccttatagggagaagggaagccatcagttgataattccctcaacatctgcccatcagaatacacaaatgcccccatccacaaccatctcccctctcctcctcccttccagtcctagaggagggaatgagccacctcctgttgaaggccagcccctctgtctccaccctggatctctccctttaacctcatcaaatactacattccatcagtcatctcccttcttggtagtgaagcagtaaaaagtggcccattttgggtgcaggcaataagggcacaaactatagagtatgtaaaaacaataataaaactgactaaaatctggcctgcttttttattagcaaaatgcatcagcaattctagcccacatcagtaataaaatactcctgcctcctgggaccgggatggggatcccccccatatacacacttggtatcccagtggctctttgtccttccgcatacaaacaagtctctcccatctataataaaaatcctctctcaatccaatgtcctcctcgagatacctcctcttctaattcaaatccaggcttctagattccctgactcaagctcttcaacttcctttatccctcaatctactgcaacctgttctctgtgtccatcactcagctgcaattgctctcaccaaggccaccaactgggcactttctaacccttgacttacctgactgcttcccaactctgtagggcattccttcctggacaccttcaatctctcttggctgtcataatatcacactctcctagttctcctccatactctgatcactccctctcagcctttttaatgggctctgtattttctacttgtccttaagtattgctattctatgagtcttcattgttggccctcttggcttcttaccccacacgttctcctggtctgtcccaaccacacccacaggttcaagtactgtctctgtctttcagagctccagacccactttctagctacctccactggaatgcaccgtggacatcataaatatgtgtctatccaggtcctgtgttctgtaccctagtgaatgatccctctgtccattcaatccccagtagcatgtaagtcaaaggggactcctttctcctcctgtatcacatggtcactaagtgctgtggatgctaactcatgatcccatctatcctcatctctcaatgatctctgccactaccttagttcagcccttgtgctctttctcctgcactattgcaccatcttccttcttcatcttctggctcctaatccttccctcttcaatcctttctttgcaattgcagcttgagtgatattttgaaaatacaaatctgagcatgtcagatccctgcttcagatcctccccattggcctaaagcataaagtctaagctctttatcccaacattcaaggcctttcatgatttccacctgctcctctccaaccccatcacttcactcccacacccccacatgccctctgctccaaccacatttagttacataggcccagccatgctatgttccttctgcctccatccttctgcatgcaattcctaagcttagaatgctctaagctgcctgggaaaaaaaaaccttctcaccttctctgggaagccttctccatgcttagaattaggttctcccttccatgcttccttagctctctgtttatgtttcacaccctatagtaaccactttttcacccaatgcattttcactgaacacctaccgtatgccttatcctgttatgaatgctggggctgctgacactagtaacacccagtgcctgagctcaagaagttcctaatctagggtgtggtccctatagtcccacctactcaggaggctgaggcagaaggaatgcttgaaaccaagaactccaggctgtaatgcactatgatcatacctatgaatagctgctacacgcaagcccaggcaacatagacaaacccccatttctaaaaaaaaaaaaagaagttcttaatctagtggtgaaaacacacataagtagatcagtgcataccatggggtaagtacagaaataggtttcaatgaatgctggagagcaccgaggtggatcctaactatatctggagagctcaggaaggttcatgcctcccagtctttctctaaattacaatttccgcagggaggagatggtggcattcatctatatacatataataagccctcaataaatgcagctggcacatcctcaattcatattggatggatgattgaacaaaggaatgagagcaaatttagtcacttcctcccctgtcctcccaccactctgtgtatccctctgttatagcatatattaccctcttgtgatttttaaatttttgcatctctccatctagactgtgagcttcttgagagctaggactatgtctgactcatttctgttgccctggcacccagaaaaggacatggtttagaaaaagcataccttgatctttctatattaagtacacacattaataaccccatcatcaccctctgtatccaaagccacaggcaagagagagaatgagaggtctgttcctaatgcccccactagcctgagaacccagcaaaaccctcaacatgaaggatctcccccagggagcacagtgattgtagttcagagagtgggatgtgatcttcgtaatcatctagtgcaacttcccaatccctctctccagcataaaaatcccccctgccagcctctaacttgcaagtatttggtccgtgactgggagattcctctctgtaatgcaaccaatcccactagcctgaagattgggctgctgtagagttcttccttatgcactgaggagacctcatgatgtcatagaatgtgagttgggcaagcctgaattcaaatcctagctccccatttcctaactttgcaagtgaggtactaatctctctgaggctctgtttcttcatctgtgaaatagagataagaatgacttcctttaggccaggcacggtggctcacgcctataatcccagcactctggaaggcctaggtaggtggatcacttgaggtcaggagtttgagaccagcctggccaacatggtgaaaccccgtctctactaaaaatacaaaaattagctgggcatggtggtgcacgcctataatcccagctactcaggaggctgaggcaggagaattgcttgaacccaggaggtggaagttgcagttagccaagatcaagccagtgcactccagcctgggcaacagagcaagagagactccttattttaaaaaaaaaaaaaaacaatgacttcctttattgccatgaaaataaataaacgagaaggcctgtgcaaggtgcctaagatatagatccctaatgcctccttagccagtcaatttcatctagtaagttcactcattggccctgactggactcactggaaactccacaagacttcagggctctccttgggctccagagtccaaggcttctccaccgccccccgaccccacacccgcctctttcctctagggcacactctctctcaattgccacctacgctctacactcccaccccacggcccccagccaactggataccttcgcagaagtcaccacgctcctggaatcccgcgctgcagctgcagcggcccacaggcaccagccactcgccgtcggcgccgcagtgcatgcgtggggggctgccaggctccccttccgagtgcgccacgcacgttccggccacttccaccagtgtggagaaggcgctctcggctgcggtggctgggaacgtggccaggccccgcacggtggcgcggcactgcttgtagtagacgcgcaccgagacaagcgccacgcatgcgcccacgtcctgaaaggccaggtggaaaccccgccggctgagcggtccgatctcgcgcacctctgtgttcagcttcatcttgcgctcacccaggtcgccctgcgtgaagctctcgtccgccgcgatcgtgtcgattttgcggggccggctgccgcctaggcggggacgcccacggcccaggtcggcctcagtttccaggtagtagacgttgaaggtctccttgcaggtacccgcggcgccagggatgctgctgcagtcacggagtgtgaactgcagttccacgaagatgcgctgcccgcggccacggcttatccagccagtctgcagccagttgtcctggttgggctccagcacattgcacacttggtacgtgcggatgggacggtcgtgttcatccacgccgctgatctcctcccactggggacaagagtaaaggggtgggcagcccagagccaaagtgcttccaggaggtggagcgctagcagtgactcctgctttctctctcatgcaccatgcacaccccggaaattgtaagatgcagcgctgggagaaactttggaaacaaatgatcccaatccttatttttatagatggggaaactgaggctccagagggagagcgatctgaccaggtatgcacatcaagttagtggtggagctaggaatggtgcctgtagtttcctgactctctgaccagtgccctttgcactccaccaagctgctgttacagcccacatcatcctcccctaccccaagtctccaagcctcttttaggactcccagtcttgcttgctgtgtcaatcaatcaacaacattgcttggaggatctactactatgtgcaagccactgtcctgtattagctccatccagatgccacatttctgttcctagacagccagttctctcctcacttattcacttttttttttttttttgactgtctaactggctgaagactcaatgttttctaacaggccactctggcttgaagccagggctgctggagaccacacactctgaggagcacttttgtctgatgtaaacatgaggagctgaggagactgtgtcctggaccaccagaggatccctgggacagggagggacacttgtgcacttaccccattacttggcagtgcagtccagcccagctcggcctgggaggctttggaatccaggaggataactaaggagaggggaagacagaaatatcagaaatcgagaaggtcagtttagcaagagagtggaatcctttggtgaagtccctgtaaatttgctgagagaatgcaatatgtgacaaatgatatgggcaagtttttcccactccatacatccccaggaggggtgtgaatagctcaaatccagagagaggtagccacagtcagtagggaaggagcttgtattcagttcctggggctgctgtaacatattaccacaaatttagtggcttaaaacaacacaatatttttctgttacagttctggaggtcagaagcccaaagccactttcactggtctagagtcaaggtgtcagcaggactgttttcttttggaggctctgaggggagaactcatgtccttaccatcttcagcgtctggtggccgcctgtagtccctagcttgtggtcccctcctccatcttcaaatcacatcactttaatctctgcctcagtcatcacactgcctcctcctctgactctggctcctcctgcacccctcatacaaggaccattgtgattattgggcccatccagataatctaaaacaacctctccatctcaaaagatcactaatcacatatgcaaagtcctttttgtcaattaagctaacattcacggttctagggattaggacattgacatattgggggtgggggtcatcattcagccttctacagggtccatggcaaatactctaaggttggctctcagattgggggtgggagtcagtgactctccccagccttcttaggttcccaaaattatagctaagagtcaattagagagagagagagagagaaagtgagtagtgaatgtatcaggggattcctgtatataccccccaatccactcctactcaggggcttttctgaggtcggtggtccccaggcatgaagacttgaacatttttagactgactcccgggcctctgagaaaacaatgtggagagatactgctaacaactggagaaataaaatctctcttctcctcagccagcccttttcccaggggctgtcacttccactgcttttgaaagaatgtctggggttcttttatgtatacatctatgacccttcctaccagagaagcttgaagtccctttattcccccaggaggcatcggatcagcagcctgcaacctctcagcatggatcacagaaaatggtttggacagcagagtccgcagaccagagacaggaggtcaggacaccccggagtcttgggagattaccctctggagcttaaaccagggggtgggccaccaaggtgagggcctctccagaggcgtcagcgactgtgggcaggaccgccgacggctttccgagatccgcgcaactgacagcacatcggaatcgcgaactggaaggcatcagccatccagggcccagaccaaccccgcggtcaacgcctcagattccagctcctccggattctgcacctagatatgacgcctctggattcaactgagcgtatagctcccctaaatgcacaatcagaggcaagacgcgggctccagtatcgccgacagcctcaaacccggcaacgcggagcgcgcccggcagactacgctcagaattcagcactgcggacagttccatgatcagcacgtcgggcagcgcccggatccagccccctcgaccagcattccaccttctgttggccacactgtggtctcctagcccctgtagtccgggctccatcccgtctccccatattccgagctcacctccgcatctccctgtctccactcttcatctccccgcccccgcacctcccacctccaatcactcagcttgtccgtctcaccggccgctggaccgccgcctctggctcccgcggttcctggcctctttctttcccaacctcccgggtctccagcccccaagctcctcagcgcccctctcttcgctactgcttgatcacatttttctctgtctctccagttctttgctgcctgcttgcttcaagccccaatacagactctagtctctccaatgactccttcccccagaacccccatcgccagccccctatcttttggtatgccacgctccgagcagagctcaccagtcttctcaccttcctcggcggtcccaggccgccagggtcccaaaagcagcgcgagacagagctgcatccggcagaggaagaggcgcagcgggtgtggaccggcgcaggtctccatggtccgcagaccgagctgtcagtccggcggcggctcaagccgcgccagcctagcaccgctgagcaatgcccccagaccccagagccagcggggggcggagtctcaccgctcaccatcatccatgggaaccaatcactaggcaccgccgcgggatgccaaccaatccccgccagcagagggtgggaaggtggagtttcataggccaggggcggaacacccaactggtggggaaaggaaggggtcctgcagatctccaaaccgtggggggtggggcagctgtgggagctggcagggcttctgcgagaggggaatgagctggcatcggtggcccagagcgctaaaccttagctcctcattcctgagaagtaggcaggcaaggtgggcttggcttaaggaggggcgaccctcggggaggcagcaacacttgcagcctctgagctagtctgaaagctcccttgttcccaggacttgcggggttttgaagctttatgtcctgaccccaagctctggggagctctcctgtctccctgccctaggtctgttcctgtgtctgaggctcccggtgtctcctagctcatccccccctttctcttcccgccctcatcacacacacacacacacacacacacacacacacacacacacacacacagcggcaggaaggaggggccgaacgatcccgggagctgctcgggaaaggagagcaaagtgagggacggggtcctgccctaccaacgcgcttccgaggctgggaaaccatgtggacgctgggatgggggcggtggcggttttgcatgaacgatcggttcctcaggttcttgctcctgctgtcaagatacaagcagcacacctcacaaccacccatgccctcagtctgctcagagtcgggggttcccctctttgatcaccccactccgcccaccccaggggactggtgaacagcacagaggccaggaatcggagacatctgcgagagaggcggagcaatcctggcagagttcagccggcgctgaagaagccgcaagaaaacgtggaacaagacctctgtctagtgaaggtcatttatgtgcaagctgagggtttaacactttggtggtgggaagggttggggccctccaggacgagggaggcggctactgagcgccaccatctgggctgaacttgaggggagaaagctccacccacctcgtggcttttccgagctcttttcttgggggacccaccccctctctatttggaagcgaatatagcctgagaaacctcgagagtgagtgtgagtcctgtgactacttggcccctgcggtctgagtgtctgtgcttttgcatatatgtatccctcacccctctacccagccctcactgggcgccatgctctgtgctgcggatgccctggtgaaccacgctgtctctgccagagtccatacctctttgaacgccgagtgtaaggaggattcctggcatcgtagatcactggccatttacaacccgctttcatgtgccatttctgcgtgtgtgcttgtgtatatgtgcgagtaaatgcacacgtgcccactcagacatacttgctggacagtagcaataggagg

SEQ ID NO: 185 - DNA, 468208 bp, Homo sapiens
  source 1..468208: mol_type = genomic DNA
ttaaggtggatgatgagaaggtggaggttgatgacatcttcccttcaggcacagaggtggggtaggagggaggggaggggaggaggaaggcagcctgagtcagagccagggaaggaaagaattgtcaggattgggggacttgagtctggctgtggtggagaggaagaagtcccagcaaaggagagactagacacgcagaggtggggggtgtggggaactgatttagaaaagcccagaaaggagagtcatcccaaagggaaatatcgcatctgcccactgttagctcattaacagaccaggggaaaggattggtgcctccaaggtgagaggcgtaggaggaggggtggggaacctaacgggtcatccctgaccctgtaggaccagactatcatcaggtatgtagggggggcgggagaggagggaaggacacatctccagcataacatataacagcctcaaggtgagtttctgatttagaacccttgaccatctccagaaacaggaagataaagtgtagctgtgagagctgagcctgggagaattgctcctatctccaaggctgcatccccagttgctgcctaagtccttcccacccacactgaaggcctggcccacagcaacagtgcacctcgccttgcaccggcctgggagagccctcttgcaggctttgctgttttatagctgactgtgtgactcctggtctccccacgctgagctgtcctctggggtcagggccctctgtggaagttcacaatgcactgggaagtgaacaccaaaggcaaccagaggcttctgcagaaaaagaactgcgaaacgttggacaggaagcaaatccggttccctgtggaccctggagcaagtgcccacaggttatctgaacagtattcattctttcgacggacatgtactatgcctcccgcaggccaggcactgttctgtgaactgtggattctgtagtgaacaaaatagacaagaatccgaaaatggtgaccccattttaatgagggagagaccccacgataaacaaaatcgattagtaaataccaacccatgctagagagtgaagagctctggaggagaggcacgggtgcgcccctggagttgctctaaacagggtaggcagggtgctcttgtcacagagaagatgaacgaaggctcgtttgatcatttaaagcggatccagtcctgggtgggatgtaagggcacgaggcctccccagctccttcgctgggcaccctatggggggacagggtgagttgggcgggccgctgcggttctccgagagcaccacgagggggagcccggacccctcctagcgccttccgagccctcccgcacagccttgcaagcaaaagtttttcttaaactaacaatgccagtgtaaggaggtgctcgcgcctgattggccgggggaattttgcaggtttgattccttgattggacaggaggtgttaggggtggggagagagctgatggtgggggatcccgctccctcccgcgtcagtctggccggctccgtcctcccgtaggctccgctgtagctagcaatgtgacaccaggacgcactcgctctcgcgcgctctcccaggctcgttctccctcgccctctctctctcacacacgcacgcacacacccacctctcccataaacacacacacacacatgcacacccacacccacgcgcgcccgcaccgccccacgcgcacacactcctgcccacgcccacgcagcgctccgggaagtccggtccgggcgagagcgcgaaaggataccgagaagccacccgcggagagcgcagcggcgccctgggacgcggcgctctcccggcgctgctgcctcggcttggtctcggcctgcgggccgtcggccggcgatggccctggattatctactactgctcctcctggcatccgcagtggctgcgatggaaggtaacgtaccctccacggagcaagttggctgctggtgccggccgccttgggactgctgtgctccgcggttcgcggggttcctctggctgctttgcggtgcaggcatcccgggacccgagggcaaggaggtttgggagcctcggccgctgccgagcgcggggcttgggcggcacccaccagagcgcccccggctggctcttagcgcccgaaactggctcgcgagtcccccggcttcctcgccccggcactccctggtagcctcggtctcccgcagcccccgctcggagagctcggagcccgctgcattgcggtgcatgctccttagctctggggcagagccagagctgggcgttggggagaaaggggtgcctctggccatccggctcctggagtactggcgcccgtctgctcccaggcacggatacgcttctgagcagccgcgcgccacctccttttctccagctcgcagtccacgggctagtggactctgcttggcgtgcaagcactgcgcgcgggggccggagaagctctgccgtggtatcccgcaagtggccgccgaaggagaggggtggagttcattggccgtacccttggggaccagtctggtggtccgggcgcctgcgggactgcaggtttccagggtcagtcggggagaggtggaaacccttttcgcctcttgagccttggaacaggagtgggctggggtgagtggtcggtcctacctaaagtctcccagcctctccaccaccccggagaggatactcggcggccgggagtcgtcgggcagcgtcactctctgccagctcagacttggcggtgcctccggcttggtggctgggaaagcgcgctccaaagacaccgtgcccggcgcagcggggagcctgggcgctcggtagcgctcgcgaatccctgtgggaaatcccggcccagctccccgcctcccgccccttcccccgcctctgttcttcgcagcctagcagcggccgcggcagcctcctgggaacacagctccgcgggagagcggagttggagttgtcgggagaaaaccaactctaggggtgatgcgctgccgcagtccggctagcagccccactttccggtgtcctgctccggatggaactcctctgggggactccaagccggggaggagcagctcttggcgaccgcgcagcgttcccatctgggagctcgctccgcttgttactcgttcctcgcgaaactgtgaccggttgcccagtggaaactcccccaaacacgatggtttggtgccccccgccattccggaaagctctgcccttctggaagtgaagctggaggggcattccgggccctgaggcgcggctaagattcccttcccttttggcgaagaccaccgcatcccacgtttgttctggtggcggcgtgggggtgcggcgattaatgcctagaaagctctcgcttgcttttccgaaggtggctttttgtctgccctcagtctcctgcttccctcagggactgctgggctttgtagggaggggagcaaggaggggtttgctttttggaacgtgcaggagaagactggagccgtgtggagtgccgtcaacaccctggcgcagggatgcctgggtttgacttattgagagacacgtgtgggagcagttgaaattggaaattcaaggggatatatacccccaaaccgggcaggaaagccagggtgagcgcatttgcaagggcaattccagactggacttgcagcattggggtggcgtcatgcaggtccgaggctcggtccggcccgcggctctttgcgcccccagaggttcagtggccgggtctcagaggagatgggtgcccactttggggagcgtgctctcggcattgggttcctgtgcatgcaagcgaagtagtttggagagcaaacgtatggaaacacagcaggcatgaggacgtggtcagtttcctccctgcccctcttcttggctagccagaggtccctgtctgcttgccggaagctgcccgcgggtgccattgtgtcagagcccaggccttccggagccacttacccccggtgcggtggcttcccttgctgcagcctggaaactttgccagtggcctgacaggaaggagcctgactctgtgggctgaaaatctctccagcaagggttaaaagaaacgcgacattcagcagaatattaaagcagccccctggtccctactcagtacgcagggatattacacaccattcactccctcctctcctagaatgaacacaggcaggctcattttctactctctacacacggagccgccttcccgcctgcctagctgggttggggccagcgttatttggttcgtgatgagtgagtaatagtgatcagaaagtggatcaatgagctgcctacggagagcaggtccctcccaaactcggctgtggtcagggggcgcctctccctgctgatttcagactctcatgtgtctgtctgctttcccctggggtctgcggtggaatttcagtgaggcattgccatccagggcaaattgctctgaggccaggcgggccctcagcccaggccagggcagggacaaagggacagtgacaatcatgggccaggtaaggagatgtggccagaggaaggcagggccctaagacaccccctgcctgggtggaaggagggaggacagggtctggttgttggccagaggggcagaggaggggaggggagggggctcaaattctcataatcaggcaggaggactgttggcttagggtgtaggaaacccagactgaaaaaaagctcctcttccctcctttccccccacactcccgcatttccagccagttctgctctgtgaggagagagatgccactacaaggaaaagatccgctggggctaagtctgtcttcagaagggagtaaggcaggctgtggtggcaagaatgctgacatcctcctgccttctggacacaaagccaggcctctttgctcagcgtcctgacaaacaactgcctcttcaagcccaccggtgccttttcccacctgctctgagagcttgttgagaatgggctgctggtgtctgtgaagcgaaggcagctgcttgcattctctgagctgcgtcttgtcttgtgccctttgggataggatctggaaagcacattggccctcctgggaggcagcaacctgaaattgctaactgctcatagcattctcccaaccccactccctgtgtccagggagtacccatgcacctgcagaaggcctcagagtgcggcacactggctgatgggaatactcccaggagacctgctcttttgtgtagcctatagtgaagtcctggccctggcacccttggatgtccacatgtatttgagtagtagatttctcaagggttgacaagtagtgggttcccagtaggcattgctgatgcatgagtgcacgactaaattactgtgcccctttgtggcgtgccccaacgtgaaatgctagggcactgaatttcactgtacacattttggacacagttacatttccattacacgtttgtggtggaaaaccccaaactaagcccacgtgtcttcaacaggccacaaggtgaggcagtgattggctgtttctgcattttctgttaatatttgtttgctgtgtgttcatctgtttttggtgtccatgaacgtgcttgagcctacaagcagtagcaggcaccaaagatttttaaaaatgtctgagaaagaaaagcaaatttgagaaaattccatgtattagctgattttattttttgtgcaaagtggaacgatcaccattactcagtgtttgtggagctgcctcctcaagccacgcatggaatgctggcgagggagggcaatgcagctctgggcaatggcttgggaaaagtcttggcaatgtaaacaactgcagaggcccagactcagtcccagctcaaaccttctgggttagtagaagagagctgccagcagcttgtgatgctcccgagcctggggagggcctgctaggtcacacagtgtccggctccagccccttctgccttctattgacttgtgcaacccagacccagatctcagagcccctactttgttttttcacaagaatgggtaccgatgaccaagatgtgctataagaaaagcccatgaggcagaggcatggtatggttctcatttaattttacccatcgagaagtaatctttgataaagcaaataggaccaaagaagaagggtgatgctaggggacacaggacagcaccatgaccccctcctctggatctagcatgtgtgcttcctatttagtagaaactacatgttctttagttgcttgaataaattttgtgaactcggggcaatgaaaggaatatatgggtcaggagggaggtctggccatgaggatggagatgaaatcaacatgggtggtgacagatagcaggatcatgaagccagagtactccacctgccttttcatctcccagctctgttgcttggaaaaattacccagtccacctggccagtgtctttctttgttgagtgggtcatgttgcccacttattccaactataggagtagggacaagtaatacccaatataaggacacactctgtactagattaaaaagaaagtaagatgctattaaaatcaaagatatgtttatattactaaatttaaaataatatatagctaatccttaaatgttcttagtatcactaaggcttagatgtgtagtgtttttctagcatgggcaaaaggtaggggcaattttggaagcccaaagaggggaataccagctcaggtagtgtttcccagacttcaggtagtatattacctgggcagtttgctacagactcctgggtcctaaccctaaaagctcagcaggtttggatggatcctaaaaatcagcattttaagtgggctttcctggagatcctgatgtatgtgcttcctggaaacactgccaaggggaatgtttctaaaccaggttacagtcagaagtcctaataggtcttgcccaactctgcatttgctgaatcagaatggcctggggatctgcattttactaaagggccccagtgattcacatgcagacagcctggcaccagtatatttggaaactgctgatgagatctaattcacttaatccttacaaaacctatcaggtaggtattattataatcaactcctctcccactttttagatgagaagactgagatatataatagttaagtaatttgataaggtcacacagctagtaagtggccaagcctggatttgaacccaggcagtcaggctctgtagtctatatttttagccactttgctccaccacttttgaaggctttgcatgaaggaagactcatatcagctggaatctaggggagggaagggttctagtgctgactctgccattgggcattggagacttcattgactcactgggagcttaggtttacatggtcatgcaagaagagatgagcaaaatgttcagacaacctcaacacttcagatcaagctccagtttccatgtagctctctctctgcaccttcctcctaactccactattcccacccctattgcagccctatacactcatagacacagggctggagacctgtcctgcagcctttctagtaaggactggtatattcgttcctctctctgccctgaccagcccttccaaagaagaaatgatcagcagagaagtgtccccaaaggagatgaacctgggacccctatgtgttctgggggcagcggagggggcacaccgaacccttacctgtcctccattgactgtcgagagcgtgttcctgcacctggattccaggagtctgcattccttggaagagctctttttatgtttccctcttatgcactagccacttaagcaacttgaatatttctgtcagatttccatgtctccaaagatggtggagaaacagagcattcgatgtctgcccttctgaggaaattactgtaataataaagtaacaccttgggaaagatttcatatttaaaagcaaaattttgcatgagaaattcttcagcttcttctgcagattccatttcaagtggcagctgtaggtggggcccttgggtcagagtgcttaactatgcttgggtggggggcattgagtggtgaggtcaggaccatctgctccatcaaaggtccctgatatctgatgtattagagccactttgctggcttttgttgatcattcccctgggggttagaaagttgggaacacactttccagggaggcctggagggcagtgggttggttcttctttgttgatggaaaaccactttctatctgacttaaagtacaggaagcaaacaagtgcacagttagctctgtccttccttgtgcctcagttttctcattgttaaatagactggaggaaggatcattatggtagagagagtagcagggacttggagtgggtgcacaccccagggtagaagcagtggtagaagcaggggctgacaggccgggcgcggtggctcatgcctgtaatcccagcactttgggaggctgaggcgggcggatcacgaggtcaggagattgagaacatcctggctaacacagtgaaaccccatctctgctaaaaaaaacaaaaaaacaaaaaaatactgtgccactgcactccagcctgagtgacagagcgagactctgtctcacgaaaaaaaaaaaaaaagaagcaggggctgacaattgtagataaagtccaatctgaggcatggtgaccctttggcaaatcatgggtggggcatggatcctcatagcctgtcaggggttctgtaggaagcagctcaggatctgattttcagacatcagggatcggaaagaatgagcttagccaatatcaagaaggctaagtgccctccatgagaaagcctagtgccctccatgaggaagactgtattctagggacctcccactggccagcagcaggcccaggcttgtgcaggtggtacagacaggattgaggtcatggtccccactggtaccatgtagcattatctgccagatgcctctcactgtaactggcttgtatgtttacttctaactttgtgaatgagaagatttcattttgacagcctagcaaatgagttcattatgctcccagccttctagggcaggaaaagcatcttattcatctgctcactcactctccagcaagcatggagtgttagctctgtgggaggatgcccaaagctgaagatctgggggcccttcactacactataatgaccctgctggtgattgaggtttcaagatgatctgcttgcgaaaagagggaaaaggtgataaagaaggtcctgtttccccctccatcaccagtacagttgtttctccaggtcaggtgaaatcccagcacctgcagacagcaccactagcagctgcttaaggagggtgctcatgggaggttcccccagagttctctgtaacagaactgggccaatgtggaaacacataggagattttctgagaattaccaggactcatttctgcccacagattgcacctgaggccctgcgtctctcatctctcccctcccacttcctggcagcaagtgacaaaatgactgtttgaatttaacctccttgctctgcttctccatttccctgtgaaggtgataatgaacagagaaatgggcagaggcaggtggccagaaagggaggggacaagcgaggggagcaggggtccaaggctgtagcttggcaataacttctgaggtccctgggactgattacgggggccatgtaagcctgagggagccagcaagggatcaggcttgtctgcacagtcttgacatgacatgtcagaagcaggactggaggtcggtttttagggaagggaaaaaactttccaggagtcctacaggctggcaatgctggatccaggattagattatgctcccaaccactcattgagcatttgtcatgtgctggtccctttatacatattggtccccatatcctttgtatctaagcatttttttctcccattttacagatgaggtagctgaggctttgagaagttaactggctcaagagcgaagtttcaaaccaaagtttgccaaactccctgggcctctgtctcccagttcagtcaccttttccatttaactttgcttagttgtgaattaaatcagtgagcatgtgttacccaggagctgtctatccttgtcctgccaggtgccatcaaaggcacagacagtcctgctctggtgtcaatgctcggaccctgtggacaggctctcttctcactctttggagttgtcccacctgttccacagctggaggaaaactttttccttctcggtttgcatttccctgttacacattgcctttcccatgtgcccctgcgagtcagacccccactgtggtcattattggctatttttttttttttttttttttttttttttttttttgctgcatgtctgtattagtccattttcatgctgttgctaaagacatacctgagactgggaagaaaaagaggtttaattggacttacagttccacatggctggggaggcctcagaatcatggtgggaggtgaaaagcatttcttatatggcagtggtaagagaaaaataaggaagaagcaaagtggaaacccctgataaacctatcagatctcatgagacttattcattatcaccagaatagcacggggaaagaccggccaccatgattcaattcccttggcgttggtccctcccacaacacatgggaaatctgggagctacaactcaagttaagatttgggtggggacacagctaatccatatcaatgtccatctagatattgtctttgataagctgtgttgcttagatggttgcagttggcatctgtgcctggatcttggtgggtgtgtgtgggggggaggaatcagggcacagcgcaggtcttctggtactcccttcataggctcaccttccagaggaagggccagctgctgctttttgtctttgggcacttctacaacttcttctctgtggactgtgtcctgcttacccttggcctggggccatgttgtttcttgagctctggctgcttttatccatctggccaggtgcagacttacgacatcagaggaggacactaggatttggcatcaactttgagcgtggaagaacatgtggggggatgttgaggagagaaatccctcagcatcctagtcccattggacagtggccagtcacccttggagccgtggcagtggaaagggctgagcaggaggatgaggaataattgcaggtggcttcattgacggtggcagcagagagaataccttatctgtgaaaggcagctgggccttgcagttaattgttctgttgttttcctcttggtatttttccagcacatcaacataggacctttgcccttggctttctcattgacgctgaggctgaagccgggaggtgagctggggatgggggattgggaaggggcctcattccaggtggtttcacgtgaattcttggtgctgaactatctgtgcaggttcctccagggctgtctgctcctgggggccgttgtcacaggaccagaaagcccatccggggatgctctcagctcctttgacaatgcctccaaatggtttgggatggtggaatgcaggctgtaaactagatggcaaggaacaaggtgtcagtatcagaaaatccaccgcattttggacaggtgctcagaggccgggggcaggcactggtcagaacacactttgggtgtcgaaccataatgtagtatttggtttaatcctggtcacaccacaggtgtgaatccgttgctggctccctagcaccttcagggccaatcattgcaagaccctacatcacctgggtccaccttgcctcctgccctcctgcccagcagcacttcctttcccagctccacacaggtacatgtgtacacacacatgtccacaggtgcatgtgctgcacagctgcacatgccctgggcatctccttaacttcatccacacagaggcccttctgactcatctgtcccgtgtgcctctgggtctgcacctgcttgctctgtttgtgttgcatgtcttactgttcttttctggctaaccctaaattattcttcagaattcaccacagtgatcgcttcctcctggaaggctttctcctgtcccacactcgattgggttgccctctgggtgccctcacagccgcctctgcttccctctatgggatcacattccacactggtatccagttgtgtgtttattttgctgggtaccccacagctccgtgagcctctgaagcatgggttctatcctgattgtcatggcatccccagcacatagcacccccagcacatggcacataggaggtgtcaataagtatgacataatgaataaataacaagaaggaaaagatcaacaaacacttaaaaacctgagatcatgtcctatgtagtcatttaaaatatatctacaaatattttatactcttcctatcaaaatgtggaggctcattcctctccctttgaatatggattggccttaggactcactgtaatgaatggaatatggcagaagtgtttctgcataactttggagtgaagtcatagaaggcaacacagtttccacctagctctctctgtttctcctgaaatacttgccgttgtcacccagataccacattgtcaggagacccaggtaacatgaaggggtcacgtagaatttctagccccagctccagctcaagtcccagcccacagccagcatgagaggccaagtgtgaatgaaaaagtcttcagtttgttgcaaccccatccttccaggcacccctgctgactctgagtagggagagccaagctttcctcacagaacactgtccaaactgcagattcctgagcaaaatcaatgtagtaattgtggaaaaccactgagtttggggttggaacaattaataactgaaaatattttaggaggggtaggagaacaatggtttagataaacctagaaagggacttaggggaagggtgggaaaggggtggagatatgatacctcattcattcaacacttaataacaaatattgttaatctcctactatgtaccaggcagtaggcacaaaaccagaaatattacagcccttgggagcatacatcctattgggggaacagacaggcatgaaaaagacaaataatgtacatataatttcaggaaagggctataaagggagtaaacaagtgatgtgactgagagtgatgggcgcaggcttggacaacttaaaacggggaagggaggccctctctgtctgtgaatactcgaagggcattcttagcaagtgggcttaggtttgctctgcacgggagatagattttggcttgattacaaaattcttttcagtcaaactgaaccgagatggaataggctgccttgagagatgatgcagccccatctctggggtgtccaggtaaggccagagccacttccagacttgagagctcacattctacagaggcaaatggggagtgagagcagagagaccgaactgccagcactgcctaggagccaccagtgtcacaagtactcacacagaacacatttattgagcatctacatgagaagcactgtactcggaactgaaaacaccaagataaagaagacacagactttccttcagggagctcactgattaatagactggtgggggagacagagccacgcagactacaggctgtaatagggcacgtgatagactctgatggatgcggtatagcagtttcacatcagctgctaggagaaaccaaatgagagggtcagacttagagtgggaaggatttggggaaggagtgtgtgtgtgtgtgtgtgtgtgtgtgtgtgcacgtgtgtgtgtgtgagagagagaggggagagagagagagaaaaaaaaaagtttgggactttggttatgattatatccagggcaacagtgctgtctcaggactgtctccctgttttcattccttagttctgtgtctgtatctgtcaaggtcccagcagaaaacagcactctcacaggctttactgaggagggtttaatgaaaagactctctacagaggtgtgaacaacattaagggaaccaataaggatggggatgtacccagggactgacaatagtgggaagccgatactccccaaagctctcagaacctagcaagagccacagtgtgacagaggagctccctgacggaaatgagacacagagaaatgcagctgctgcccagatcaagcatggagggtgaaggaggagggtttgtattccttgagccctttctcctcctcttaaacatcatctgccagcacctcccatgatgaattcaacaagaaggcagagggcatgaaagtctggttgatgaagttcatagaggtcagaggcatagaaaatggcaaaaaaagtagagaatggatctgcagggatgaatggagactaatcagcacagtcacttatgttgacttcatcctcagataggctttctcatgagatgttcatgtggctgctggcagcctcaaactcatatcctcttgaaacttcagcagaaacataaattctcgctccccgtagctctagcaaatgctgaagaagttttgtctcctgggcttcccttgggtcctgagcctctccatgagccaaactccattaccagggtgattgaaatacactcattggccaggcttgggtcatgtgtctatgaaactctatagctgagggggaagggctagctcagacccatcaagctgcctggcctgagataggggagagctggtcacaaaactgtcagggtgcttgtccaggagaagcaagaatgagtgctgggaaggcattcttgccattgataggccacacctatcaatcttcctgggacagctaaattatgcaaccgagtaagagagatggtatgtccaataaaggaaagtatatggattctggacagaagaaggaggtatctgtggctgtgatggtcctgaagatgaaaagatggggaaacagaaagtgatgggcaagttaaaaacccaggaagggaggtctggagacagctggacaaataggttctttcttgatgggatgttctgtatcttcctgagcatcatgatcaaatttaaagtgctgaataggcagatagcagtggtgtttggttaaaggcaaagtgatttttggattagggcatctcaactagactgaaagaggagggttcctatttaggggcaagatgagaagaacaatgggcgaagagccataatttctcactgtaatcccctggttccaatgtagataccagagcatctgaatttaaccactgcatttaaatttgatatccattggagagcaagaatgaaagaaatgcatactcataggtacaatgagctggctcatttcccttctttttcactatttcaatcatggcctagtctcacctggaatttccattttgcatcagtagaatatttattcacagtttttgatgtactttttcccctaggttttgagtcttgtataagatggcagatcttcaaagtcatttgcagactacttttttcataccttggatatctctttctcatttgagagagagagtgatctaaaatgtacttagagtttatcagaagaaggctccatttgcccttccaacttccctgctcttggctccaactttcttctattcccagctaagcagaaaaagaacagattttttttttttaaaaaaacacagtagcacaatgctgctgatctgcatgaaaacccgtggctttcttttcccaatcaggagaaagtaattttcctttcactcacctgactaacttgttcagagcatctcctcctcacccttttctgatatcttgctgctaagtatttggcaattcatttgcatttcaatggttccttagcaactatcatgccctcaggattaggtacaaagctactctctgacacagactgccagggctacatcgccctcttttatggtgcctgagttaccaaaccacgccctgcctagacatgaagcacatttactaacagcatcacgtggattctgaattataatgccattactccctgccttatctgagcatgcagacttctgagcaaccctcgcactgaaatgccccagataatccagtggttcctgaaagctgccctctgatatgttttcagaaagagagtcacagatctcagcattggaagagagtcctgtctttggacaggcagcgaattaggtccatttaatggatgtggcagctgaggttcactaaggaggaatgactaccacaagatcaggcaggcaattggaacatgccaaggagagatgagagctcagggcactgctgcttcctagtccttgctcacatactgcatcctgctaagagagacccatttgtcaactattgtgagctttcaacataatggaagttttaacataggtatgtgactctgttgatctgaggtcctaggagataaatcttctcacctaaccagagcacaagagtaactgcccaagtgagtatgcaaatatgtatatcacctggtttctctggtttttggcaattaacattctttccattcacgggcttgaagcgtgggtagcacaggaggagtgtgtgtgtgtgtgtgtgtgtgtgtgtgtgtgtatttatgcagatgatgtagacagacagtgacactggaccatttagcaaattagaatattctgccctgagtaggtggtgctgcttctttaacagcaccaggcctccaccaccagggctcactggcatagaacagcctggcaaatggaagacgctattcaggaaaggacaatgagaacaacgctcattctacaggaggactgacctttgcaactcccacttcacgttgttattaaatatctgggaaaagactgagagaacaattatagtattgtcataatgtatcagcgtacaaagcaagtgtttccaaggaggctctggttcagctgagcttgacaaagccggggactcagctatagcacttactaatttagaagttgtcttcattacttacaccagctgaaaactccgaatgttttgggtgcagttctgccatcgtggactccagataggaatggaaagataagatgttgggagcaaagggtgggagtctttgggtttctatgtgtctctctgctaggcttgagtgtgcagtcctagttgcagccatctctctctatatatttagcctaagcctagcagggtactggttctcaggggtcctcctgagtatttgctgagttgagttgggttaaagactttcataggagggagagtgagcgactgcttttccccagaaggggagtcccataaaggactgtgagggctcgtgtggcccctccccctttcccacattcccagctgatctctcacttcccacctagacatgcccacaacaccctctgcacaggttagcctcccaggtgagaattccactctcaggtctgggggctggggctgtggtgtccaggttctcactatcacagagttcttgcagctaaaccagcatttctcaaccttattccttattctcatagttgcccctactaagaaggtttttttttttttttttttttctgtcttgctctgtccccaggctggagtgcaatggtgcgatctcagctcaccgcaaactctgcctcccaagttcaagcaatcctccggcttcagcctcccgagtagctggaattataggcgagcaccaccatggctggctaatttttgtatttttagtagagacggggtttcaccatgttggccaggctggtcttgaactcctgacctcaggtgatccacctgcctctgccttccaaagtgctgggattacaggcataagccaatgcgcccggcctaagaagcctttttaagactttttttttttcctgaccaccccacaccctgtgaatgttaatagcacagatattgtggacatctgttcatgtactgaggccctttggtgggccacaaaccgttataagatctaagactttttagtcttcctccttgccaggaatcagttttcacctttgctgagaatgcatgatctaaacacaataaacctggcagcgacttagtgggccctcagccgagttagagctcagctttgcaccatctatcttttccaaatcagttttacccagtatggccctaaacagtcggaaaggatgtccaccttagctggtccaggaggccccctattgagcaggtattagccctgctgttggatatcctagggagatccagaaggacccagataaggacgagagcacaggagtaactcagaagccttgggcaggagtgacttgccagtaggtgtggaagcatttcaggattttaacaagtacggacggctatgccagtgcctactcgctgaatgtctgccctgacttcaagggatgtgaaaatagttacttgagttggggtccatttttggaaaaaaaataggctttcttgaagcataatttacatataataggttttagatgtacaattccgtgaggtttcacaaatgagtgtggtcatgtagccaccctacacacctgatgtagatcgttctcatcaccctcatgtcccttcatggtcatgtgcctcccttcactgctgacccttggcaaccactgataaaatttctggttctattgttttgcttttctaaaagctcatagaaatggaatcatagagtatgtgctctttatttgtttgacttctttcacttagcatgagtatttgagattcatccattttgtggcatgtgttatactttctttttattgctgagtagcattccattgcatagatatctcacaattggtttatccatttcacagttggtggacatttgcttatagtttttggcttttataattaaagctactgtgaatatttgagtacatgtctttatgtgaacacaaaatgaaaaataggtgttcattttgtttggggaaatacctggataatatggtaagtgtaaggttaacttggtaagatactgccagtctgttttccaaagtggctgaagtgtcttgcatttcctccagcagtgtatgagacccccagttgttccacatcctcaccagcagttggtattttcagtctttaaattttaaccaccctggtgggtgtctcatggcatctcattgtttgttttcgtttgcatttccctgatgtgtctttcatgtgtttattagccactcatatatattctccgatgaaatggatgtttagatatttgtccattttttttgttgggttttctgttttgggtctgctttcaacatggacggttgtctggaggtgacagagtgaccccactcacactatttccagacaatttgggttgccctgttgtgccgagaagacataatttgtacctgtgctgggtgggtctcattcctggaagtggggaagagtgggccatgatcttctcaacatggatggtggtttatgatcagggaagaaatatgcccccaaacaggggccaggacctcagaaagtgggcttttgttaggggagtgtgtgcgcctcagcaggaagccataattcacatgacctgggattgtgctactctgtgtttatttcccatacattccctccagttccaatctcatctccatcacactgctcagtagaaaggaagggcattctcctgcctctacttggcattgcaggagcagctgtacctccatggtggtggcagcagaaatcagctagaaattcccaagggtcctgcttctccagggacaggtatcttttggtttggggctttcttttagagaagaaaagtataatttttctgcacagattgtcctgtgaatggtggtctgaaaccatgcagaggaagcaccccctagcccagccctggactctcaggactgggcccatttgataggacactgtgagtgtccgaggctgttcatcacctttttctcagctgctctgactcccaagaggtttccagcttttctggttcttgttgcattcaagccatagagaatgcctttggctcatttcttagctttcaatgacagtctcaggattctacaggctttccaacactggggatgatgtaggcacttcagccatgtttgctgttatttgcatgatgacaatcagtgatcacagtaatcatgggggaggtgacacatgacaaggatgcaaaggctgcagtggtaccatcagggcccatcagctgggccctgtgtcacttcccacaagcaccttttatgctcaaaagcaaagatgcagctgatgctgacgctgcatcacttctggctctgagaaaagcaggcacccccactgtctgagactccctgagggcccccagagtctaccccggggcctggcacagagtaggcacttagtaaatgatggatggatggactgaactcctgtcacactgcccaggatcactcagggagaggctgatgcgcatgccaccgtggcaagaaaaccagggacttgtggcaaacagaagcaatggaagcataggaaacctgaatgtctggttgtggagatcagactgatatacctgttgctggatggagatacctgaagatggttcaggcaaggaatctgtcattgaagagactttttgctagggtatacttatggataagctgggccttgaacatgtagaggggagagtgatgaggatgcatatcatgagtgagaagtagcagaagcagaagcaaggagaagggaaagaaaaggtacctgaaatagcaattacattcaagtaagtgctccgtgatatagccaggggctcggtgatgtaggaggtcaggggacagttagtttagagtgggctatggtaaccaggatggcttcctggaggaggaggtacctattgaaggtatagtggattgatgctgatagaaaaggcagggcataggaattctcttctcaacaggcttccctgtcctgggccagaatcatccgaaatggggaacctgcagaaaagccttcttcagtgacttgtgcctctctgtcttggacttcctggctctagaaagcccaggaggagttcctgtgagggaaggctctgcatcttgttgcgtcccaagtcccagggtccagttgccattgcagacgaagcttcattcagaggaaagcaagtgcatcttgtggtggtctggaccagctcttcacagacggtcttctttggtgtcaccactcggtgtgtggcctttgggccagggcttgggttcccatgggagtttgttagaaatgcagaccctcagacctcacctcaaaacaactaaattcagttgtgcctggatcgagagtcccagtctctaaacttctgcatcagggaagcagcctctttaaataaattaacaagcttattttgagcaatttttaaaaagagctatcctagattaaagaatacttaagattcatgacaagttaatgtaacaaaccctatactaagaaattgctttaaaggatatgatttggacaacaaacaaaattggaatatagccttccaaaattcagggagtgggtctccttagatgaaagtattataacaaaatgttaatatttccaaatttgtaactgcattgtggtcaaataagagaatattcttgttcttaggaaacaaatattgaggaattaaggagtaaatggccatgatgtatgctacctgctctcaggtggctcaaggaggaaaataaacagatgaatgtgtgtatataatataataaatgtgtatataataaaatatatatgtaatatcatattatgatatatcctattgtaccataaaatatatgtggtgaggaaagagaagatgaaaaagcaaatgtggcaaaatgttaaaaattggtgaatcagggtaaaaggaatatgggggtttctggttccattcatgcaactttcttgtgtgattgctatttctttaaaataaaaagtttaagaaaacagtgcgccttgtttcaaagtttgatggatgttgcaagttgccctctaaaaaggctgaaccaatttatattcccacaatgctgtggagggttggtgcagctgtttaatgtagctatttttattcagctattttgatgccagggactttctttgatggggtcatatatcagttttgacctggggacattttgttgttttccaaatttattatgaatatttccaaaagtatagaaaagtcaaaagtatgctgaagtgaacacccatgccacagcccctgcccctagtttcaacagttgttgttattgtgccatatttatttatcagcacacatttgttttttggggggcatggaaattgggatgcagaaagattaagtaaccaccaaaggtaaatgctggggccacacgccgtgtcctctgcacgttgtccttctgcctctgaggtactttttttcttttttctttttctgtttctgtttttttttttttttttgagacagagtcttgctctgtcacccaggctggagtgcaatggtgtgatctcggctcactgcaatctccacgtcttgggttcaagcgattctcatgcctcagcctcccgagtagctgggattataggcacacaccaccacagccagctaatttttttgttttttttgtatttttagtagagacggggtttcaccatgttggccaggctggtttcgaactcctgacctcaaatgctccgcccacctcgcctcccaaagtgctgggattacaggtgtgagccaccgtgcctggctggatttttttcctgaagcagttgagtgttggattcagacaggtctggatttgaattccacctctgacactgaacaaactacataacctcccagttatggcctctgtgtgttcgtcccgtaagtggggatggtggtactcacctcacatgatcgttgtgagatagatgagataaggtgtttaaagcccgtggtagttattagtattgtcatttcttctgtatctctcttttcatttgaaacagattcccaggcaccctcctctgggaaaattgatccctaaatcattcttctgcttgccaataccttgtctggcccatctattgctggtgtgtagtccttgcctactcccatagacttggagggccaatgttctaagcagcttagaaaagctgatattcaggcacgtgtgctggggcgatgttcagtaacctgacatgacgtatcatggccaagagtcgcaggcgtctcagtggttaggcagcagggcttcctggggcactcaccctcagtgtgagcaggtctggacgaattcctagcagacccagcagagcaaggaaagggcctgtggaccactgctgccttctctgccgtctccaggacttcctcccatctcaccaggattccagtttgtgggaaaagggaggaacagggactagggtaagaagaaggaggcagccacttggagcaaagtttaagggggcactaaagattaatcaaggtaagtaatatatgaatgtagttttttttttaaatcaaattctgtaaaccatggactatgggctgcctgtttttgtaaataaaaataaagtttgaaggccccagtcagcccattcccctctctgtggccccaggaattggggggcactggacagtgtactcactgacattttctctcctctgtagaacaatgtcagtattgcctgcaattctagtcgtcacagctccttcaccgtttagagggccgggtgccatggctcacccagcacctggttctcaggcttctggccagcgtggcagagctgaggccatgtggagggctggaagtgggtggcacacttccctgtcctggcagaggagtgcacatggagctctgtagtttctgtccccaccgtggccttagacctgaaggtatgaatccatgcaagaggctgctattgggagtcagagaactggctcacatttaccagctgcgtgaccttggaaagccacctaatctctctgaagtttcattctcagtttcattacctgtccattggggatgatgtggtccaacctctttctctttgagctcttcagtaagaggttgttgagtaggaatcagagcccatgtatgggaaatgctttgtaaactgggatgtgctctggaaacacaagctgttcttataatggtggttacgattgattctggtggacagctcctggcccaagcctggtggaatggtcatccatagagggaaatgagatccaatatcccaagcccctgcccagagggggaaagcgcaatgactggcggtcgggagaactgtctgccacatgcagccaggttcacagacacctcttgaggtcctgtgcctatgttcctacccactcttcaaacaggtggcttcttaatgcttttccccgccccactcctggctcagcttgtggagttctccattccactgactttcctaagagccatgtggagaggaaagatgtgaagagggaaggcatgtccaggtactgggataggccccttaggtgaccatctcacactcctaggtgattgtaaggcaatgactggggaattcactttctctaccctactttcatttaacccttcattcaacaagaagagaaacctacagccagctcttggataatgaggttgaaagtccttggaaccctgtttaagaggctgacaggcaggcagcctccttggcttaggatgtatgaccttatggtatgtccatgctgctggggacagtcatagtgtttctttttaaaattttatttgtccataagtaattggggtacaggtagtatttggttacatgggtaagttcttcagtggtgatttgtgagattttggtgcacccatcacccaagcagtatacactgcaccatatttgtagtcttttatcccttgccccccttcaactcttccctctcttaccccaaagtccccaaaatccattgtatccttgttatgcctttgcatcctcatagcttagctcccacgtatcagtttccattcctgagttacttcacttagaataatagtctccagtctcatccagatcactgcaaatgccgttaattcattcctttttatggctgagtagtatttcatattctatcctatatactatatatctatcacagtttctttatccactccttaattggtggacgtttgggttggttccacgattttggaattctgaattgtgctgctataaacatgcacgtgcaagtgtttctttcaaataatgacttttctctctgggtctcttgagagccctccaagcatctggcccctcccctttcaggactgtgtttcgaggtgagcagagaagatgaacagaggctgagggcagcctggctggaaacaggaggtggaggcaggaggtgggagctgattcaatcttcagactataatgcaaaggttagtagccagtttatgagtgaagggggccgtttaggcaggatagaaaggggtctaaacatgagttataagacaagataatgttttggcaggtgggatttttgctgtatgcagaggtgaacttctgagcatagagaaatggacgttaggtaggcataaacacacctctgtctaatcactatcacttccataatcagtcggagcttctgtttgatgtgtgtcctccctctccctatgccttaggggatggcagcctcccatttgtgcataggtgtctttcacggggccagcaggcagtatgggttccctgctagtgaattcccatttcctacgagggaggcagaagggtgcccatgtggtgatctcccagaccaggttctcatctccacttgaccagtctgtaggtgtaagccttggaagtagctcctctataaaatgggaatgaatcatatcccattataggggctttggaatgagtaaatgagataacatagatggattgcctggtacagacaaggcttggtatgtagcagacactcaataaatgtttcctcccttctctgtgcctcttctctcccttctcaatgcagcagtgtggggttctgcttggagcagctgagtccctaccctgcacatccctgtgcctccccaggctgctcagacactgcccttgcagcttctttttgtgggaaaggtagttgcccttggatcttgtgttcccacagccaaagcttctctcacttttgtctgcctgggaggcctctgttgccttcttttctagcccggtcttgcctacagatgccccatcccatacttcttgctcttctgccttgcttgggtgggcccagcgcaggggacacatggacacctgtcatgccaatttctgatttaatcagtgtcagctaattgctgtaacacctgattccaaattttttagcccacaagataaaagtttatttctcactcatatcacagtctggtgaggcccgtggtggggttctgtccccttcccctcccctcacccacccctcctgtcattcagggacccatactagtagaccctgttgataaatgctgacagaggaaaaggcaaatttactcttaccttcctacctatctcagcctgggagagaaacatcactccctctttcttccactccattggcaaagactactctcatggtcccatctggaccaagctgagaaatggagggagcctccatgtctgggaaaagcaggtttagggagcacttagcagtatccctgcaggaaaaccacaacctctccatagtctaggcatggagacaaatgcttctctgcccctaagggaggcctctctaccagagggctcagaaaattccttcctccctcctttcttccctcccttccttccagtgtttacagaatgcccccttggaccagaaactggctgcctttatgaagagaagaatcggggggaagagatgcttaaaggtaactttttagcctccagaggctgggccctctaatcacaggcacaaaactattaatattattccatgcagagacaagcagccagaataattagagctcaagcaattctttcacagcaagttcttgatgttttattttattttattttgtatttatctgtgtttgcctgggttacctacagtgcacactcccaccactcggccccaggctgctttctcttttcttggaactctccatgcttcctcctgccccggaacgtttgcacctgctgttcccaatgctggtcaaaagaaacaaaaaccagatacgctttaaaagggagaaagggtttgtattagtcagagttttccagagaaacagaaccaataggatatttatttatttatttaagatttattataaagaattggctcacataattttgaaggcaggcaagtctcaggatctacagggtgaattggcaagctggagacccaggagagctgatgggtagttccagtccacatcagagggcctgagaatcatgagtgctaatggtgtagttctgtctgaatgaaggcaggctaaagacccaggaagagccaatgtttcagtttgaatccaaaggtaggaaaaaagctgatgtcccagcccaaaggcatattctggggaaggtcagcctttttgttctattcaagccttcaactgattggatgtggcccacccacattaaggggaaacaattggctttgctcagtccattcattgaaatgttagtctcatccaaaaacaccctcatggaagcacacagggtaatgtttggcagttacttgagcgaccatgttccagtcatgttgacacataaagttaaccatcacaggatttttaaagttaaggaaaaaatattagaattaagaatctgtaaaaataaaaatgatagtaaaatggtaaaaaaaaaaaatacccaggcaattaattgtttaaaggaattagccagtaaagtgaaaaagttagggtaaagataaaaggtggatggggtggggagacagaattagtggtgaaaaaaggataaacccttatggacaaggtaaaacatgaaatccagaaagctaaaatactcaaaggctgattgtgtaataaagaagaaaaatgcagaagaaaacactcccaaaccataggcgatgaagggcagaagcctggctctgatgttcaaggaggactcctatgtctttctctgctgattcttgggtgtgaaaagatctaatacaaacagaaacgtgtttgggaatggtgacactgggaggctgggggagcctgtgctgttgtgatgcctttgggatacagcccttctcaatctcccttttttccaacctgggtttggtctagttgtgggggaaaagagatcggggaggtcagagcttgaggtcacacaccaagtgggttaacagcagagtggcccttcctggacagtttcatccaggagaactttggttaaacgcaaagtgaaagacaatgttgaaaaggaggaggaggaagggagctccccataagtccttgtgctgcctgagatgagtataggaggtaggagatatctctgcttcatatctaatgctggggatgtgttccagctgtaatggagtgccatagctggcaaagacgtccccttccctctgcttgaccactgcctgggaccaagctttaggccctgtggctcctggggtcctatctgccatgctgctacactggctgtgccctgtgttgctgtgtctgagcggtgactcagcacagtagctgctgtccaggcatggtcaaactccacacaccactccccagcctaggcttcctgggcccctggcctctctcaactcccgtgatcaaccacccttcactcagatttggccatgagtgagcagagctggtgtaggctgatgtggtatgccgggtgatgggggcactaaccaacatatatttatttatttttcattcccattgcaaaaaggaatcacttcctaaagtcaggaagttgcctaaacatttttgaggaatgcccacaattcttatttaacatattgcttaaagttgtagaatatagttctgttctattggtgagcaaagaccactccaagccctccctggagaggctttctctatgcaccatcctgcaccaaagtgctttctgtttgtcttttgcctcattttgcaaagatgacagatctaagttacattagagacccttctattttaaaatagcattcttttgcagttaaatttaaatttttttctggtcaccttggaagagatttgtgtctttctcagaaatgctgagattgtttgtgggagttggggtagcagattgtagctttggcttggcataaacgaacccaggcagttcacacagggatcaggtgtgggtgactggcaaggcctgcaaccttgcctcagatctggtgaaaagggaagcggaagtgattttcctatctgtcaaatggaaatgataatgcttagcctttggagttgttgcgaggggtacatgactcctcaggaccacaggactacaggaccacccagcctactcattccctgcacattccaagagcccagaccctggtttaaaagctccactggctttgccttgggcctgaggcctctcagataattgcttttgcttaaaagccattaagtcactcagaagaaggtgtgaacttgagtaacgactcaactgcctccttgatggagaaagtcagttcagagagaagccctttctaggtagaactagcttagctggcagatcgcaggagcagtggacagtgaagacagaaggacaggagaaagagggaggtgacaatgaggggagcaaagtccatgtcatcgtggtcccctcagttgctctcatccccataccctaatgtctgccaggggttgtgctgaaaaagctcacacaaactcttaaagtttaaggtctgggggtcttggggaaggaaggcctgcctggtgagcacctgccttccctcaggctccgtaacaggaaactctcatgtaccgcttgcaacaactccaaaggctacgcactatcatttccattttacagataggaaaaccaaggcccagcttggcagggtaacaccagagtctcttctaggtccagccaggtttctttctactcttcccatgaggcaattagccatgcagatctcagtaaatattcaggaagctggtaagttttccactctccttcaaacacgggaagatccatgctgatgttcactcaggaaattgtcaatacaaagaaattttattgcctaaagttagaagtctatgatagcatcagtttccatggcaacaggctatgatgtcacagatgcctgcaacagcagaatgagaagaaagcagggaaatggtgagccaaggtggggaggctgtaagacatgatctattagcacagatgcggaaggccttccatcagccctccccctgcccagcatctgctgctgcacaaagggaagcacactgacatttggaacaaatacatgggttttatgaaccatgaatgcttcagcttgcaaactcagaataatcaaaaacaaatacaatttctctgagttttctctgaatgtttacaaaaaggataatgccctttttttttttttttttttttttttggtaatcctagctcttgcacttgactaagtggtagtttcttgtgtgcccagcatggtgaggctgttaattcccattgatatggcgtatcagggtggagatgacaatgaggcggagccagtcgggggtgaagtactgggaggcatgtgggtccctggaaggagaatgggaggcagaaactcgatgttgactctgctgggcacagtgccagttggtgcacactgggtttgaagggcctaggtctgggttcctagggtgtggcacacagcagcacatcactaactgatgacaatacttttgctaattggaatccttctcatcacattgctccctgttgtcaaaagcagaggccagttatatttttcaaagatgctacagcagttatctcccatccaacaagctctttggtgatgggaacttgccaacccagagtctaactttcctccccttaagtatggattggacttgatgacttgcttgaccagtaaaatgtggcagaggtgatggtctgggacttttaaagctaggtcagaagcagcctcacagctttttacctggatctctagggactctagctgttagaaagctcactctgggaacctagtcgctgtgttgttaagatgcatggagaggccatgtatgggtacttcaattgacagcccaaggtgagcttccagctgacagccagcaccaactgccagccagcaccaactgccagccatgtgagtgggccattttggcatcaagcagtagtagaggctttggatgactgcagctcctgccaacatctgactgcaacctcctgagccaccccaagtgagaactatccagttgggcctggccaacctgcaggactgtaagagctaataaaacattactgtctcaagccagtaaattttgcgggtaatttgttacactcaatagataacaggaacacaagcagtcccttgaatttgctatgtaagataaaacccagacaggtccagggtcagtggtcacagtcctggcatgtgactgaagacctctataatgggaaggggatggccagtgcaggcctgcctcttggtgaatcctgccctaaaggaggcaggctggagatgttacgatcatctgtcagttttagaagcttggcagttggtcttcagtttggcgacataaatgtcaatcaggccaggtctattgtagctctaatgggatggttttgaacctaagtgtgcagaactgttcatttcatctggttgggtttagccaagcatcccagcaattgagattgaatgagtgtcccttgcagggtttcatctaagcctataaaaatgccaaagaggacagaagtaatatcccacaggggatgctgcttctgttggaccctctttgggtaccatttttctgtgagctgtgaattcaccagtttgtacttgccctggcctgcagttctccatatggtccatttcagcaagtgctttgctgaaatctaggtacaccatgatcttgtgtcctagggaaattttcaagaaggaaagggaataggtttggtggggcttgttcttactcaacccatgttgcctccaggagctttctatgctttctctgcatattagtatactccagtctccttcatccaccatggtttggctcatggcatcctttcacgatccttttcttcctgaaagaaggattaaatttccccctcccagttttctactgtctttctcatcttttatcattccttgaagatgcctttcttttaccatatctgcattgtttttctacattttattttacttcaactatcatctataaaaggcaattgagactgggtgcggtggctcacacctgtaatctcagcactttgggaggctgaggcaggtggatcacgaggtcaggagtttgagaccagcctggccaatatagtgaaaccccgtctctactaaaaatacaaaaaaaaaaaaaaaaatcagccgagtgtggtgaagcatacctgtaatcccagctactctggaggctgaggcaggagaattgcttgaatccaggaggtggaggttgcagtgagctgagattgtgccactgcactccagcctggatgacagagtgagactccatctcaaaaaaaaaaaaaaaagcaattgaaaatgttttttagatgctgagctaagagccagaatacaattaggaagttcttcttgttatctgcttgatatctagcctacaccagtccagatgcattgctgtcttttctggtttctctttcccatcatcatatgggggaagatacgggcctctccttagcagttctgctttgcatataatcgatggatcttgctgtgtccttcatttgccttctctggttgtgaataaataacccccagttccttgtacatttcttcaccattcctgtttttcagggccctaatcagttttatttcattctccactataaatgatttttaaagccccttggaaatataaaggttgtctaaataataaatcatcattttggcaaatgatactgagacatttagagagataaaattaatcacccccttgtagctatatagcagcttttccacagggagtacaaagtagtttgtagagctcatagttaattcttgtcccgttcccgagggaagagggcaagagtcatctttctattttgtagggggaaaggccagggtggcataggtgacttcttattcagcatgccctggtgagcagggcacacagtgtgaaagatgcttcagctctcttctctgaacatctgacgcaacatccatggggtattttaccacttttcaacctggatagcatagtgcatgcaataggttccctgggtggcagggatcattggccccatcctgcctgtacagggcctggaataattttccctccagtgagttctctgctcagaatgctgcagcatctcctgcatcaagtacaaacaccacagattccattactcaaggagctggcactttcacatgagtcaactcatgaattattatgcccattttatagatgaggagacggaggtttgtagaacctaagtggcttacttacaaattcacacaattactatatggtaatgctgggatctggccaggtttctctaacgccttagtctagtgcttcttcttctctataatctaagcttcccattacaattattttggttttgagtgacaggaaacaaaatcaacagatgtgcgcgggtgcgcgtgcacacacacacacacacacacacacatacacacacactccttatgggcttctgtgattgaaagtactgtgcagtactagtttcgggcatgactgcatttaagatgctattgggactgttcctctgtcttcagccccacttcctctgggttagcctaaagctctcctatcatgatcatcaggtttatgttgtgactacagcagaaacagggagactaatttcttggtagttcctgcacaagtcctgagggtcattctgaatgatcccagtttcaatgtgtagcatgtttagttctcaaccagtcaacatgtgtaggggctagaattcactgtttggcctagattgctcctttccctggggagctggggtggaggcggcactttaaaggcagagactgagaatggggaggggtgaaattgcaaatcaagagtacacagacagttaggaaaaatagggtgagtgggtgctggctggcagaaaccgacctgcaaagcctttcattcacatcccttgcattgcctgcctctctgcctggcatcctcattgtcttgctgggctgctcctcagatgggcaatcctctctcctcaccagcatctctttgtttatgcttttttttctgccctcatttttcaccctttccatctgaacccttctgtaccctttggcctatttcaaactttcctgaactgaggaagccttctgaactgcctggtccatgggtggcttccttctgtgctatggactcctgccttctcttttgtggtgccccattgagggaagttggcccattggatagtttccatgaagtaggaataaatgtgcaaaattcacgtgtttggcatttggggcttttggtgaagggttgttgaaaatcactgcagcaaaggatgtaggtaaaaccaacactgtgtgagtaggaacaaaaaaagatcatggagtcttaatagactttgaatatagtgtaatgagaagtttggtgtggttctcacagcttcccaagtgggatgagaaaaaatggagcattttaggctgagagactgtccttttgctcttttcctggttagttagaactttcttggagcctagtccctagttgagccactacacttgaaaaatatgtgttaattcctagcatctgcctcaatctatcattttatagatcaggaacctgagatcccaagtggctgaattactgccccagggtcaggcagtgagtttggggcacagctagaagtgaagaccctacctgatgctctgcctagcgctatttccattctctgcagttggccgggagtgactggcaaggatggaggatggagaatggccctttgagggacacttggggattgaaggaggctgcaggccagggaaggggtctaatggtgcttcctggagatgctcagtgaagtcctgggcatgtatgggcaccaaatcagggcatagacacctggattggtttggtgatgcttctcaagtatgagaagttcctagttaaaaagatgccaccccaagatttcctgtatctgcagggtcccgtccctggacgtgataaaggaggaggtctgagtggctgagacatgagctggaggaagctggcagggttggggccttctgatcacccaggtcataccctattttggggaatgctaaccaattcctggggctccttccttctctgagtagatgaagtactgctgtataaatgcactgtttctcagacatgatttgaataaaaggaaaactctcatatggagtgtgctatttttaagagatacaagttaaggaataaaattctgtgagacacacaattatttagctgtctttgtttagcaacattcttttaattaaccaccactagcatctattgagatgctgggcaagtgtgctctgctccaggcttgttttggagggaaaaaaataaattcatgttttcaacccaaatcatgagagtttcctctccaaggtaagactttgggggtgggggtggttgagtggaggactctctttgtcctggggccgtgaggacctatcaggagaaggcaactcagtacctctcaaaagctgtttgctggtgggcttttagaaccctgcgtctctgagaaggcatcccctcaataatgctttcctcccctgcacaccttcccttcaatccttcttagagcttctttctgtttatctttgcaaaaaacttttaattttgaaataatttcagacctagagaaaagttttaagtatattacaaacaactccagtatattcttattaaatattgacttgtgtccccctaaaaaggtatgttaaaatcttaatccccagaacttcagaacgtgcccttatttggaaatagggtctgtgcagaataagcagttaaattaagatgaggtcatactggaataggataggtccctattccagcatgactggtgtccttataaaaatgggaaatttggacgcagacatgcacacagggagtgcgccatgagaacatgacagcagagatcagagtgatgtgtctgtgagccaaagaacaccaaagattgccagcaaaccatcagaagctagaagagaggcctggaacagattctgcctcacagccctcagaaagaaccaaccctgccaacaccgtgatttcagatttctgcctccagaactgtgagataagtctctgttgtgaaagtcaccagttggtggtactttgttacagcagccccaggaagctaatacagcccttcacctgcatttctccagtgttagcattttaccacgttgtgctcattcctcccctgcacacatatgtgccatatatacatgtaattgttcttttcagaatcgattgacaataagttgcagacatatgcccatttactcctaattacttcagtgtctgtttcctaaaagcagtaaaaactcttacctagccacagtacaataatcaaaatcagggaattaacacacatacaatattattatagtgctatctcacctgtagcatgccatatttcactaattttcctattgcctttattgcaaaatgatatttcttctgatctcttttatctttaaaatattttcaattaaaattttaatttttattaacatacatgcacattgtcctgaggatggtgggggagttttgcagggagctttggggaattttgatctggagatgggggtctgggccgaggagcatggcaggtgagggaagcactcagagaaaggcagcatggttgaagccactagcaaaaagcatgagctttccttggaagggggtgcttattattatttttccctctcaaaaacgaaacatgtgtaggagagtgttctgggagtccttggcaggctgatgggcatgaccgtgttcaagggttcccttctggcctgacctctgcctggccttgggccgcagatgcaaccttgccctcccagctagtgtctggtgggccataagatgctgaaatgccttctgccctggacagtctgacatctttgtcctcgatacaagggtgctacagactgagtcaagaaagggtagaagccctggatgatgaatgccaagtggaaacctcagcaagggccttgaggaagggattttaaactcctcctaccctccatcagctttctctccattcttgaaatggacaatgacttcctactgtcatgcaagctcccaggaatatgtagcttctagcatcttccatctaaccagagtgcttcccctaaacccttccaataaagaaattccagaatagtctctggtgagaagatgaatcataagggggccattcattagtataactgagacccagtgtcctgcccctggcaaattgcttcccagatttctgaaaacacttgaaaatgtggcctctaacctgtcctggagcagaggagggcagctgggagaccaggagtgggcccacagcattacagattcccacaaagggagctatggcctgttgagcaggactctgatcccacgattctagaacagctgcccaatcccacagctgggcagacttaggaaccagcagatactctcgggccatggcctttcacactttctcatcctcactttctccagctttctttcctcaagttcacaaaatttagggacctttctgccctgtctgattccaaaaaagtaatagaagtttgcttctgcctatcccacccctcggatgcctcctccttcccttcaaacatctccatagaagttcccacaagctgccgccatgtcctcaaagaccttttctccactttggttaggctgactctcgatcccttcactctcctaaacattgcttctctgcacatggaaagacagctgctttccctgccttcaggccactgtggcttggcccagtagctttttgtcccgttttataacatttattgccttttcctctggttacagaagcaatacgtgcttctgagattttctgatttctcaaagaggagattctatattcttccttggttcaaccctattgagggagaactgaacctgtttggatatttctatgatacgcttgagagaatgtggggctgctactctgaaaaagaaaaatatcaatgatgctttcagaaattgtccaattgtgccaacgtcttgtgagagcggcattgttcagtgtcatggcagggtggggttgctggataaaatacaggattgccaactaaatctgaattccaagtaagcaatagatactttttagttttaggtattttaagcacaaaatattgtgtgggacacacattgacatattgcatgcggtatttgaggcatacttattctaagaaaattattcattgtttatcaggaattcaaatttaactgggtgtcctgttgtttgttggcttgctgaatttgacaacccaacatcaacatgcaagacagagctggtcaggctgtagagggccttcaacaggggtgcacaagggcatttgtgagtgtaaccaaaagcctcacagaatggagccaaagccaggctgggagcaaggcaatggcaaacagaactgagaagaaatctgggacagatcatgaggcaactaaacttccaaaccttcaagtgaggtgtctgagtccttgcaccaccctgagacctgttcatggcggttgctcttctgtcttctggcttcagtcacccaagtatcactgctatgagttcccccttacccacatacaaactgtaccattattatgtaatatttttccttaattcactgaaaaccttaaatacctgtatttttagaaggaaacttgattccatcattgtcaatggaaaacaatctcacttatcacaaattgaaagtgacaataaacatatggacaatgaagttgatgtcatcgcactctaacttttgactgagtctgaaactggctctcaattccttaaaaatgaaattagcaagtggtagagaagagctgatgatatacaagtctccagctgaaactttctgctgtcataatcagagaaccacaaataattgaaaaggagacaactttctaacgctgcaattcagtgtatttaatgttgcgttcaatcactcacggtttatgtgattctcacttttaggaggtactggtattggttaggtcttagcaatgaccagtaatgctgttttttaaaaagtgctttataaatgaatttttttctggttggagaagaagagtcttgaatatttgcaggtggaagtctgagtttcaggagtgcatgcccttggtcacctgatcccagccctgtgtgctcaacttcagggataatgtcctagagaccatgagtcaacatcaggcaaaagccatcctggggtcccatgggactctcagcgcccccataagtgaggacttagggacaaatccacctagactccttagctttggtctgccgggggtgcaacactgaccctgtgaccctgcccccgtccccaggccctctgctttgatgggaaagactgcccaggatagagtgtgctggatgaactcatgttcttgtcattaggactgtgagtgggtgagctgtgtccccaacaggccaggcagcacttggaacacaattttcccatggaaacaatgtactaaagggtggttaggttttatggcgtgattggttcaggatagtaaactttcattgagcacctaatatgttccaggcactgtgctgggactacaaaatgtgtaaagcattgtttcaggctaaatggagttcagtctcttgggagataagagcagagagcaaatgagcagatgatgacaattcagtgtgatgggtgccaggactgaaggaggcagagtatgctgtggggccccagggtggggactggccaggcctgagggtgtctagaggagctgcctgtgaggctgagtctccaggcatgaggaggtgaagagcagggatgaaggataaagggcgtgcctggcaagtaaccagccaacagaagggcagagggtcacccagcatggtgtgtgctgagattctactgtctgccctgtatttctggagcaccatgtgctgttaggggcgtgggctgagttgagtatagaggaataagcagagatagttacggaggcccccagagcgtgataagaggatggtttctcaaccttaggcaggggaaccactaaagggttttaggcaaatttacctgtaagaaagctgccctgacacttgggtggtggaggggaggcagctaagatggggtgtggtggaaaaaaagactaactagaccaactagagagcagggaggaagactatctaggcaggagatgagaaggtccagggaccagggggattttgaaactccctggaatgcaagcccataacaaggaccttgatctgttttgttcagacatatcccaaatgcttagaatagagcctggtaaacagtaagtgataaatacatatttgttgcaggagaggtcagattgaggggagatttcaggagtgcagcagtttggagatcaaacgcacatgtgatcttctgatctggattcctaactctcccctctagtagacctccagagttaagaaaaattgttacccctcacacaaaacaaactcctgactctggatagtcttttggaatatgactgctggctgtttggtcttgtctgcagtgtgacatcacagctgggtgtcatccccaggggccacccttgggtcttttgtgggactcatgttggccagcccaagttcctgttgcttggtccttatcaaagacagaacaatgctttgacatctttttatgttcaggacatggccccctccagctacttcttagatgaccctatgatcctgtggctcatacccctcgttggtggttggcttgtaatccataagttgaggacatccaggtgaaggtctcctggccatcagaacagtgttggctgtcaccggcagatgaatatgagcagctatgccatcagaatctgtgattaatagacataatctccaccagagcattaattttgggcataatcaaagcctgctgaattatttcagtgtcagaccttgacagagaagtcagcctgggattagcattttgatttaaagttcaatgggtagtatttatctttatttctgtcacctatgagtgattgactgtctgtcctggaaaataaaaacaaatgctacttcctcagtcaagtgaacagggggtaatttagaggcgcactctcatggttggctggacctgtggtgtaatgggttggcagtctctctttcttggcttccacaaggcatctgggaatcaggttctcaattctgtcagaggccaggtaactgcaggagtagctgtgttaacatctgagcaggtgtgtcactcctaattgtagtgctttagcagagctgttgcctgaggtgagaaatgctggcatgcaccattggaggtggtggaaactccagagaaacaagttccatcccagtgggactggagtcagaacactggagaccccttgcctgccttgagctggacagcatttaatggtagtagattctgtattccagcccacgtgattgctactttcagccctgtggaggggttggtagtgaggaacacaggcatatgcacatgtgaacatgacatttactgatgtggatggtgcatccaggcatggtgccagtgcctttacttgcattgttttgaatcttgaccacaaccctgctcccccagttataggtaaggacctggaagcccagagaggtgaagtgatttgcttcaaggcaagttaaaaaagcaggagccaagattccagcccagagcagtctggctccaaagcctattccagcatctgatttatcaagccaggtgggacatacattggagttggcagtgagaggaaagacccctgatccttgagggtgtctctgtgaagggaatagcctgagtggggaggaggaggtctggggaagtgagcagaaaaggggtgtcaagatttctggggctccaagggctccattcattcttgaccccacattgtcatttccttcaccagtaccccagggctcctgtttccctgccctgtggggtcctttggtcatagattggaggcttcaggcatgggagctcatttggtccaaacatagaaatgactggcacactaccaagagtcagcaagcttcttcataaataaggttttagtgaaaggctgtatcacagtcagtagtttgtgccttctgtggacactccatttgacggcagaagtgaaggcaaagggtatctggagagagggagaggatgggccctccctcatggagagctatccatggggcatctggctgggcacagccatccagtcccatgaggccacagtggacacactgagcatcccttcaaggcacaattagattccagtattctcagactgatttgacagcaacagtcaatgcaaggcatgatttaaacacctattatactcagttttctcaattaaaaaattaagtttaataatggatttaaactccttgttttccataaatcagatgcagtttttgctttaaaagatgcatttaaagaattgcttaattttctagttttaattttgcacctgaaaatatagtaatcttttaggaatttaatgtattaacgcaaattgaagcagatatttataaattaagaggccaaaccatcttcaatgtaacaagtatatatgacgtgatatatactttggtgaagttttaaaaactacacttcattaggtaaataacggataacagaaataatagacacttaaattattgtaactggttaaaatcacatattcatatattatgaatatttacattcaacagaagcacattttaacaaatgcactgttagtattttagttatagatgtgatacacaggctctataaattaacaacaaatacaaatcagcttaaatgtaatcaagataggaaacttaaggtctttcattatgcagctactttgacatttactttcttcttcctgttaattcattgaccggaaaagaaataggagctcccctgcttttttaattccctagtgattaatctggaataagtttgtctaaagaaaggagacgttgtttttctgtcaatagaatagactactattattggttttcattttaatattctgataagtttagataagtgactttagttgacttggatgacattttaaaattatgcatcagcaaatatccatctcttaacatgttcactctcagctttgacacatggagttgatattgtaaaaggatgatagctagtcattcatgcggttggctgccaagatgtcccctgcagttaaagactgatcctcgcccagctctggagaatacgagcaaccagtgcatcaggtgcatattgggacctatttgtaaatcttctctttaaaatattaaaataatctaatcttttaagcattacataactaaaaggtataccctctattccatgattttatcttgaaacttcagcttatctatttggttacaaaaaaacaagttaatattttttaagttgaaattaattttaaacatggatgtcttaaaatccagtttattgtcaaagaatccttgattgtcatcctgctgggttcacatggatgcagaatttgtttctagaaactctaggataaccatcagatggttcccattgagtccaggatgctttgcaaaatgcccttgtctgtcctgggagatggcggggagggggcaactacaccttgttggtgcagggaaggggtagggctggtgagactgggtgccctctgggctgcaccctagtagggagaagaaaggcatacttagctgggggcttctttaggccttgctttcttgctcatatctagaaaggcatggtttgccaaaagaacgaagtccaaaagaatgctctgctctggccctcagatattgaacatcagccaatatgagagagctaggtgtttgggggctatttggtggaatttttaacagtttctatgcaaggaaaatttaaaaagaaggtgaggagaatgagtggcctcattcatgcaatttctttcaagatgcactctagataagcagtcatacctcctgtctctgaccccagagcaggcactggacattacgtagccatagagaaagaagagacagtacctggatggaccttatgaataggcagggggtgagggcaggagtatgagaagtgcagaacaggagtgctgcctgggtgggctcagctccaggattatgtgggaggctgtagggaatcatgggtcttgggccatgcccaagcccccaacacactcatgccccatggattgtcaggcttctcattgcatagaaatgtaacaagccttctgagattctggtctgggtgcagttgtcatcacccagaggatcaggcagatgcaacagaaaaagatgtaagattcatgttagttgaggtcatgggggccctaagagataatttaatctgtcatcctcttctgcaggagtagaaggaacactgaggcacaggaaaatttgctgatctggtcaaagtctcatggtgtattagaagcagagccaagaggaaaccttggcttcttgatttcctgttctagcattttctcccttcacagcttccctgggcttattttgcctcttaggacatctcccaaatgtcttccccacggattctcctaacagtttatactaaaattttatcatcctgtgggtcagtcacttcttcctagtatctgtcatctcttatgctcaaatttaaaaccacattctctcatgctatgctcaaaatcatgggagaataattgcttagcacccttctcttaaaaaaatccttcacttaatagaatattataatcaatcacgtgtagcctttattgctctttgaaaattaatatctggaaaataaatgggtgtatctggatctattaataagacaaatcatgtcttaagtttggtgatgagctcagagcagccaccgccacctggtggcagtgtaccctaattacaagaaaagtaaataaagagactgctttccagaatgcaactttggagctagaaaatggaggcaaaccttctacccctaggcagatccaaataaaagcatcaagaacaaaataattagaagcagtctgtaacatgttcaagtaaattatttcttttctactatatattcattaattcatcaattaatattcaggtaaaagaacaaatatttgtacacgactgcctactatgtgctaggcattgtatcaagcgttttatatatgttacctcatttgattctcaatatacgacacaaaatattgtttctattttacacatgcagggaagttaacagggaaatccacatggtcaggatgtgaaagcaactgttcaggccaaggaccagacttgtctttcttccctcactgcctcctaattctgcagagtcctaagtgtgcatagtaactgtgctcagcagacacatccctgccccttaccgtgcttgttactggctgctgcttatttccatgtagttgttagatgactaatctgagcttcacctggacttttagagtctgttcctttgttcctttgttgttggaggttctggctatgttatctttcactgctgtgagatggtcatggaagaaagcaaatcctagggagggaaatttgagtttgacaggagctaagctgcctcaggttaaaaggcagaggggtaggcatgtcctgaaagcgcctctgcccttggtcaccgagaaggccctgctgtgccatgcctcaggcacaggactgagagcgcccaattctgcaccccagactgagtcatgacctcctgccaggctgactctgactggagtgagagaggggcagtgccctgggatagggtctggcataagacaggacagtggtgagtaatgggggatggatctcagacacatgctgagtgttttccaggtcccctattaggaagcccaactgcatagatgatggtacctttttgggtggggagtggaaaagtttctaggtgattctgctgcatgccccagaggtaccatttgtttaataaacaagtgaaaggctgaatgtgacttgatgaggatttgctcaggatgggccaggactgagaccccctaaaggagtccctgagaccctggggcatcccacaatgaggtcctgggacaggagtagggagctagcatttatttatggggacacattattccactgcctcctggtaagaaatctctttttttctacactcccctccacttggcacctccgttagtgatcaacttgtattcctccttgaatcagctatttctatgcatccttctgtctccccaggcagcacacatcactatggcacagggcccagggcttacttcctctttccccatagtgcctggcccagggctttgcctgtagtagacaatgttaatgtttgtggttgacctacagaaggtgctctagacccagatgcctactgggggcccataggtttcataaccaggtgaggttgcctggtggggaccctgtgaataggtgaactcctgccccatctagatatatgggcattgcctcatcttctggattttcactggataaaaatccccaatttttaaatgatgacaaaaatgcatttttttttcttttacagctctgtatcggccaaataaaatcaatctggctctcagatgcattggaaacttcaaattaaagcaggacaaatagcctaagtatgccctaatcctttaaaaatagtttctcagtgcccatacctaattatatagctcttggcaattgaactgtctttcaaagaagtgagtatgtaatagcacccacttcataagaaagaaaattttatgaagttgtttgagtcagaaccacaatcctaataaaatgtattttatgaagttggtgagaatgttgcaatctgggtgccgttttacagagcacagaactggtacacattgtaaatatgaggtctctgactggccctcagcctctcttttggtgacaggtgtgacaactcctccctttaagagtttcctgggaagcttccagcacagggtgggatttagtgacctggctgcgataaccctccagctcacttctggattggctcatcgctgttaacagcagtctccagccggtcacttaacaatgcaggtgttattaagaagggtgggttttgcaccacaatgcctgccctatcttgggacttcttctggggtatgggccccttccctggtttccctccttctcagagcccccttcctcagctacatctacccttattccaccaggagaagctgtgtgtgtcaagaagtgggcactgagtgatgctgctgtgggactggtggcttctaccacttccagggagttttcctggtttccaggaaaagctctgatgtgggtggcaggcagtagccaggacatctctagagcctaggttagatgctctgcctgtcccagccatgttcagacccagccaggaagccttagaggaacagggcttcccataccagggcccttgttcaacctgctgctcatgctgctggtgtcactgttgtccctcaaaggcttatgtcctgtcactctgtatgtgggacaggtgggaggtctccaggttgctcaccactgaacactgctgagctcaggtattttgctttctagggaggcttcacaaggatggaggcagtaggatgagagattcctgaaaggaggcagggatgactacatcataaaaaggtttcctctatttatttcactgatgtatttgatttaaaagctgactctttggagtgaacaccctctcactcaaaagagctgactgaaactatgagaagagtgtgaatgttgaattaggctcacaatcatttgaatcctgctttggcttaactctctgcataaccttaaggaaacgtgtcctcagtttccctccctgtaaaataggtttaataaaatattcctttccagcctaaatgagggaacttggggtgattggtatagtgtctggcatagtctggatttaaattctcttatttctttattcataagcgttgtttgccacttaatgatattcccctttgttttttcctggctgaactcatttccaaagagtttgagagctggggaaaggataaaagtaaggggacatcatagacatccccacacattgttgcagtggtgctgtagtctgattgtgatcccccgaaattcatatgcttatgacttaacctcaaaggtgatggtagtaatagctggggcctttgggaggtagttaagtcagtcatgacagtggccccttcatgaatgggattagtaccttataaaagagaccccagagagctaacttgctccttccaccatatgaggacacatggagaagttgctgtctatgaatcagaaagtgggtcctcaccagtctccaaatctgctggtgccttgatcttggacttctcagcctcgagaactgtgagacataaatttctgttgtttataagctacctattctatagtattttgttatagcagcccaaacagataaagacagttgggctcctaggagacctcctttacaccagcctcacccccttcactcttctgtgctaatgccatcagagccctgttcatccagtacctactccatcctgggcctgtgccattccaatgcctgcagtcagaagatccttcctgaggcacccattagaaaaactaattcttctaattaaaaacaaaacccaaaatccctctaagttccctttaattgggtaaaacccagtcctatttccttagcttggctttccgtgggcctccttagctacctacaactgacttttctaaccttttctatcaccaagtaaagtaagacaacttgctcttcttcaaacatgtctttcccatctccacacctttgattgttcaattctctttgcctggagtgcttttcccactgtttccatcttttaatatcccacacagctttaatgaatgggacggttcaagtggcttctcccccatgaagcatgtccttacccctcctttgtgctattaatgatggatttattacactgatatatgatataaactcaacaatacggtgttattagtttatataattgtattacttttaaggaagttagagaagaatagactgttcatatatttaccatttccagtgcttttcattttttttcctgtgttttcaagttaccttctggtgtcatttcttttcatcttgaataacattctttagtatttgtttgtattttatgcagatttgctggtgacaaattttctggctttggttgtctaggaatgtttttattttttcttcatttttataggatagtttcactgtgtatagaattcttggttgatagtttgtttcttttagcactttgaatatcattccattacctttgggcctccattgtttccgaaaagaagtcatattaatcacattgatgtttctctgtatgttattttcttttcttttgtggcattgaaaatgttgtctttgtctttaaacatttgactatgatgtatctagttgggaatctcctcgtattaccctagttggagttcattgggatttttggacttgtgcagattgatgtttctcattaaatttgaactgttttaaaccattatttttcaaatgtttttctttccccttttctctttcctatctggaagtttttttatcacatgtatgttgatgtgtttgatgttaatcaatggatttctgaggttctgttgccttttactttaatcttcttctctgttctttggacatgataatttccattgatctatcttcaaattcattgattttttttctcttcaatcttgaattttctgttgagctcctctagtgatttttttatttcagttattgttcttttcaactccataatttacatttagttttaaaaataatttctgtcttttaagagatgatctctatttttctgttccttattgttatactttctctagttatttaaaagtggttttatttaggtttttgagcatatttataagagctactttgaagtttttgtctgctgtatctaatatctgagggctcatagatagtttctattgattgctttctttcttgagtatgaattatgctttcttgtttctttggatgtgtcataattttctgttgaaaatgggacattttagataatgtattatagcaactctgagtgttattttttcccctgaatgatgatgttgttactggtttgtttgtttgttggttgagtaacttgcctgggctaatctgtgaaatatgtcttctctatggtatatgaccacttttgtgttggttcagattttagctttaatttttgtttttatttttatgtcttgcttcttagaggtctgtgtgggttaacggtctgccaatgattagacagaggttgtgttcaagcaccttgagcctcaagacttgcattctctgccattggatctgtgtgtaggtaggaaagcacattcaaaattcaggtcattttgaagtctgctctggctttggctttccagtgggatcttccacctgttctataagcaagcgtagccttagggctggccaggagtgtgtggctatgttggctcctctctggacttaattgggtatgtgcacatcctcagccaagtatacacttgccccagtcatgccatggtctcacctgctgagcacatcacttctactgatactgctgccggatatggcataaccaaccactccaaatcaagtgagttccctttgacccacagctttgatgatcttcatgttgtttccttccctagcaggaccttcatatcagcagagctcaggggagggtgaggaggagggtgctttcctaggcaagaatgccacaggtacccactattcttactcaaactcccgtctttgatacataaatacttctcagattgttgaacatctttggttaatttccaggatgctgagatgattgtttttgtcatttttgctcatttctgcttttttcaaagagagtttgcctgcctcctccctctgctctagccacaagtctctaccagtttgcatgtgttttgatgtgacggacttttcctggctgtggagtccctggagagcctgagtttcctcccctacttaccaaagagttccacctgaatccacttcagatttgtctgtgaatcttcaatgcatgacatgatgcctggcaccaagcaggtgcccaacaaatgtttattgcactcataatctgaaaaatgactgacagagagtgctctacatttggatactggatgtggagtattctacagacctggctttgggtcagtagaatgctattgatccttagtttctcatttgtaaaatgtcaaaaataaaactcaattcttggagtagttgtgtgactgaaataagatgcagaaaccatctagaacaatacttgtcatggagtagtttttttgtaactattaatttcatttctttccataagatgtgggattgatgaagataatatgccttgggtgatctggcttattcatccattcaaccagctgtccatctacccatccatcttgctgcagatgcagagataaataaaataagattgtattctggagaaacacatctagtggcaaagacaggcataaaaaataacttgcaaagctgtgggcaatagctacaactggtatgagtgaagaagtgcaggctccgaggccagaagagtgacatttggcagagggatctgctgtccatgcctctttgccgtggcttcgaggtctctgatccagggcagagagtcaggcgtgcagagagaccagaccacccagccacattctgcatcccacagaattcttgtgtgaggagatatcccagcagaccttaggcagtaacggttatatacatgctcacattgcctctctaggaggtataattttatttttcctgccactatcattttacccactgttttgccccaaagcactcacatgtcacagtatttctgtggagttgaggagcatctaacaagctctccttccatttttcacagaggatgcaccctgccctctcttagggaacttgaactacccacacaatacccctctggcccctctgcttacacacacagacacatgctgggaggtggaggttttttgtgcccagatcaaagaggtctcatgatcatttcttttcacgactgcagagggtcttctaaggtggtcacacctttggggaagtggggctgccagcctgtgcttgggagttgcatctcctctgatcagtatggtgttgcatccttcaggcactgcctctccttggaggcccaggggacaggagagtgaggaacagtacacaagttttctctgtgtgttcaccaggcactagggcttcttgctgtgtgttaagccagcagcaatttttctttgcaaatacagacccattttagaagttgagtgctcggtgttgtggccgaacagaagccaattatgaagtggttcattgcttgcacgttgcaatctgccggggcagggctccgaggccccatttggaggaatgttagtgcagcccagtggagcccaggttgcccataatgctgcctttgcgataccttccaagccttgcattattccctccacgcacatcagcaagagcatcgcgtgggtgctcctttgcttgccctgggaattttatagcccaaatttactattcattattgtttccaaagtacatcttgtgtgatgcctgttcggtggtaaaatggcttttcccccttcttctccacggagttgcttcaaaatctgctcctgcctgagggtgggggaatggtcctcttcacgaaagtctttgcagaggggatggaagccttgctcacctttgcaggaggtgttttgggaaggaaaggcatgggggcagggcagagcaggcaggctgagtgctctggtgggatgctcaggtgggatggaccctggtccatcattgaggttgaaacggaaacctctgggtatttacccagcgaagtcacctggataaggaatgggccgggagggtcatgtgatgggagtcaaggcaaaaacaaaagaatccatttattatcctggcaggaaatttgttcttttggattctgtagctgcagacagaatgatttcatttccttcggtggcgggagattaatagcccttacccctgggcctctgtggattgctgtttcctccatttccctaagtgtcgtcaactttggtatgcattcctttctgaggggtcagagggtatgcgccatttcacgctgattaacagaacgtggccttccctgtggaaggctccaggatacccggaggtgactcaggttaaaacacacacacatcatggaaaaaaaaaaccacaaagagaggctgttcataggagcccaggacttggacagcagcagggcaaggcggggctccacctccggcttcagatgtagccactcaccctgaggctggaggcgtgtgctaaagcagggagccccaggaagacagctgggactaggacagccaccagcctattagttgtgtgtttggcacaggatatttaagctcactgagcctcagtttactcctctgtaaaatgtggacactccacctactttaccagtccatggggaggattaagtgagatgctgtgtctaagtgcttttaaaccaaagtcctctgtgggagtgacagccacacacaacacaccttctggtggctgcagggaagacaattcctgattcctaatcagccttgtttgaagaccacagtaaggtgctgactaagtctgttggtctgccccaagatgaggacaagaagaaggcaggaaatgggaaccagaaggtcttggccagggtgcatcctcacgagtatcacagagtcacccgagggagctatttccacctggcttcagtgttccatattttccagagcagaaatcgcatatgtggagtcagattccatgtttggataagcataagtgttgtgtttttaaaaatcagacctaaacaattttcccattgtggctgaagatatcctgtgccctgataccctgcctggagacagcgtttagattgtgtggtgctgtggtttctacccactgagccttgcacatacttggtgcttaatggctatttgttcattaggaacctttaattaacgaacctttgcatttcagagagatgcaaagttgactaatttgggggcatttttgtattttctgatgcctcagtttcccatctatgtctcatctccaccctagcccacattcatagtggagactaatgagtctcttatgctctgcataaagagatgtcagattgaatgaaatgaaatgaaactggattaaactgcagggctgttgaacacaggaatgtgtgactgggaccaggggttgtctgctccctggagaccctgggaatagaaaggggttatccagagaggttggttctgggacgtcttcctggtggcaagggcatgtctccatgaagcattgctaaaaaataagttaaatttggataacagagcaattttaataaacattttacttttaatatgtttatagtgttgttaattatctctctaagtggagaaaatagaaattgtagcacattgaacaaagattgctgattaggataataaaatggaaattttaatcaagacgataactttaagtcaaaggaggttttctctgaggctgctggagctttcgtctttattaaacaccccatttatcatcactacttcattcatcgcaagcattagattaatattgacaatttaaaatagaaataactttttattgccattatggtgctggtgtgataatggtgctagagactttgcgggagccgttgcaggctgtcacgctttctctctgctgtagttggtaggcagtcttcagcccaaacctcaaggtcccagccactcagggaggggatccggtagggggagggttttcctgccatcaagcttcttcatgacttgcagcccactaaatcttgtatgctctttattgagaaagcaaaaggcttttggtggcttgaggttgtttcttcagtggtagaaccatgcccaaaggccaggggcctctatttttcaatccaatacaagagctgtattttgagtatctgcagggtagtgtggagatgccaaaaggcaggcaagactcagccttgtcctgtgaagatcacacctacgcacaaggcgggagcctgagtttcagatgaacaggagggacagaagtgctccagaggtttagggcagtggttctcaaagtgtggtgcttgggccagcagcatcagcacacacactggtcatggagttccacggcccttaaccagtggttctcagacttcagcatcagaatcacgtagagggcttgttgaaacagattgttgctctccaccttgagtttccgattgagtagcttttgaatggggcctgaagaacagcattctgaacaagttcccaggtgatgttgatgatgctggtctggagaccacactttgagaactactaatttagagtgaggagagactgctaagagcaaagccaagaggacttcatggagaagagtccttttggcttttccaggggaaacagaatctcatcaagtagagaggaagatgagtgccctggaaggtagaggatcagagtcagaaatgggaaatttggagggcatctggccctgggaagagggtgtttggcttacgagcatttgcagttgagatggaggtggactggcacgtggagcctgtagttggagatggggatctctattgccaactctggagggggtagtggcacatgaaaatgcagcaagcacccgaggacagagctaggagattatgggtctgtccctagcatgggttctgtccctggatcaggaaccatttgtgccagctagacagtggtaccagccctcgcatggctgcctcttgagatgcactctaggctgggccaccccagaaagacctgtgggtcggggtctgttaccccgttcttagaatctggcttaattgcttttcgctacatatctgcctttactgggctgggctggggggatatgcctcctttaactctgctccaagaagcctcttattgtggggaaaaggaccatcatcctgggaagaggaccaccacctgcccatgttatgtctgctgggtctagctttgagagtcaccagcagcaggtggccttgacctttggggttcctcttccaggagtttctcaactgcttctgaggggctgtgtactgtggctccagggaagacagggctgcagacgagcagagctgcctcatctttggagcggcttctttcttctaccttctccaatcctctagggctccttaaatgtgctacattcctttcttaaaaggcctctttcttttccttgatcataaaattgccaaggaacaatagctgtcatttaaaacagcagctttaaagctccttccccaccagttactgccattgtcatatctgttccacatcaaagcagtaggagctccccagagagagaggagaggtggccttagttcttctctgtactgtgggatgagctagtctgctggtgcttctccacgcctgacctctggctgggtgagagcttctctgagaaagagggatgtttccaaccttgccccctgggaattctctcccggcctgagggaaatggggcttcaaggcccacagggatggggacttgacctcactgactgttcaccgtcgggtggggcagaggatggggaagtgtggggcaggaagaggcctgtgtcccaggcatgtggtgagaaggggctatgggtgagtctgggggctaacttaggagtcttggtgcgggcagttcatgccagccccagaaggctttggaaatgtgtgcctgagcaaggaggagcggctggcattgcctgctcccatgctggctgtgattcttcattccctgtcattacccgcttcactctccataccctgggagctcttgtggctactctgagggcacgagggaggtgcagacagtgtccccaggagcagggtcagctggagcagatcattctaacctgttggtgcagagccaggggggcattcatctgcttccccatgggggcagcagatgcagctggaagggaaattgcatcacaatggaaggatgggccttggccagggcctggaccaggaaaggcctttttctcctcttcctggttggaccattgccttctttcctcctggactgaagatctgagtgtgtttgaagggaaaggtgctggtcctgtgtccctccagtgtctggctgggtccagcgaagggaaagaaaggctggagttctcagggccagcaggccttgtctggagggaggaattcaggctgcagaaaggcagagcccagcagggcacacctgcctactttatgctatgcaagcttctcagggacaggtttccaaaagtgactaggtctctggagaaactcatttccaggcctcctttggggtcttactgtcaaatccttgcagcctttcctccctgatccccagtgccctttgacccggatccccatctcccctctcctctttgcacttccccctctgctttgtcccccacttcccatttgctcccctgggttttcctcccttcctccatccctccttcccctgcaactccccttgcagcttcccttctttctgtagccacccgtatgcactttggactttgtatgcattggtttgcatgggaggaacacctgggctgtcttggcctctgcagtcttgttccttgggctactgccagtccctcatgggggcaaaaccatgctcacttgccttgggtgccctgacctgtggacactgtggccattttccgctgcctgacaaaggagagttttttcctatctttgagttttgttcacatgttgtcttgtaaaagaaggtatagctattaaatactctttgttacacatttaatgagttatgttggctgaaaaccataaaatggtgcaaaatcatgatagcctggaaaaatattgtaatcttcttactgtgttgtagctttgtccatgttcagagctctgctattgtcttttcccaggccctggaggcctggtgtgcttccatgggccttaggatgaacctgagatcttaatgcatccttctttgctgaatgtctgttttgaaactctgtccaagggtggattttcagtagaatcccagggctacaagggtttaagttcagattatgtgccccatgtccctcctggcagtcggctgtgcactttacccacctcggggcgtatttctacctgttttaagtggtcacaacaggagagtccatggccatctcgttccatccacatgtccccacccctcaccactgtctgcctcaatgtcccctccttttggttgccccacccctctggcagtctgccttgaccctaaatctatagccacagcatgccctgccactcccaccctggcaagcagcttttcacagatggctctgtcaaatctggacgggttccgaagatgttattggatttctgtagccctcttgtgccaagaacatatggggctgcaggagagaaggggcagagggtcaggcacttattccttcctctgccccatatcgcctttgagcacctccttcatggtattttagtaattccttggtggtgaagtgatgggattttgaagaggatttttgtaggtgcatccaactgcaacagaatacatcagcctcatcggaaggagaatggaaggcctgagaacgcacaaaaggagcatttggagagggtaaagtcacattcctctgacactttgggtgcaggtgtccgtatctgtgcagtaaatgtggggtgtgtgtgtgtgtgtgtgtgtctgtgcatgtgtgtgtgaaagagagaaagatacatacatacttatgcaacctaattatcgactggtattgtgcaaagaatgactaggcctgtcttcagcaccaggccactgtcatgggataagggacaggggacaagaaaaagcagcaaaacagtgaggtataagtggaggagtgctggaccaggttggggtatctgagccctagggctgactgtgctgcccactgctgtgagaatgtgggtgagttgctttcctctctgagcctcacagtctccttccatactgtcagagggcaggtggggtcactgccagctctgactttctatgactgtcacatctgaagaagaggaagcaagtggagcccgagtcgggagggagagaaagaaagagaacagaaatagacaaagctcagaagtggaagagaaagaagtagaatagaaaatgaaagcagaagtgagagaagtggaaagaaaaggggagacaaaggggaaggcgaaagcttacctgggggactgttgtcagcaaaggcagaagagggaagcacttgtgagctggtgagtgctgctgccccggtgtggctcacagggcctagccctccctgggtcacccagagaaagccagaggaggctgtgggtgcccctggagactcctcagggcatgtagggggtggtgtgagcagcctctcacagtggagctggaaatggagagaagtggcagacatgttttggggataaaacacacagattttagtgataggttggctgcaggaagaaggagagagagagttaccaaagatggcatccaggtttctgacttttacaattagtggatggtggtgtcacttgttgaaatgggaaagatttgaagattaccactttgggttgactttgaaatggctgagacttgcaagtgactattgagaaggagattggatatatggatctggagctcggaggagaggtctgtgtctgagttcaagatggaaggtggtagccacagttacacagatggtgaacctgcctgcagaagcaccgtagcacagcaatattcttgagcccttcctgtatggatggagaaaagagaaggctttggggaggaagagaaggctttggtcttccctgcccagggccaaagcagggatggaaaacagagacaggggttccatataggagcaacttcacatctcctgcagtgcattgtcctcatccaggacagagagcccatccatcatggagtccttcctgggagcccatactcaagcctccaaatcatccttcgctgcaaccacccaataccaaaagtgaacatttttggtgtgtgagcaggcacacatgttcttctcctgccctggagattcacccaaggctccaatgccaaaatatggtgttgtccttgctgcaagccctgaggtgatattgggctgagctaggttgaagctccaggcatatgacgggtctggtattactgggagtaattgtgcgataggagagcacagggcctggctcacagtaggtgctgcatgaatatgtgtggactgaacaaatgtctgccggagtcagtttgactgcagcctcttgtgagtggaggaataggattctgcttgatgatttaggggctgagccaagcctgaaaggagccgtttgggaggaggagatgatctgtgtcctggtcttaatcctctaaactctccctctggattaagtcagacccaccatgaacctggctgcaaggtttccactcttcaaggatttgcttttattgcaccgcattttggtgagatgccatcagcccgcactgaggagctttagaacagcctgtgaaactcggtggtgtttactgtgagggtgtcactgacagcattcattgcatcacagagtgtcctctccatggggccccatgggaagcgtttgcctcatgcttccatagcagggacagccaggcttctctgagtaatcgctttgtatgtcctgtggaccccgtgacccgtgtaactgatcaggttttcctcatccattgactgctataaaattgagctccaaatgcatggcttggccatagaaattcagttgttttagcctcatcatgggcttcaatttatgtctttacgcttggtttggctttctctttctcacctatttttctttagagaatttttgttgccttttttcatattgtaaaacaaatatagattctctataaaaagttaagaaaatatagaaaagtataaagaaaaaaatgaagtgaattataatcccctgcccactccttgggacaatctgttaaattttttgttcagcttacctgtctctcctatacatgagtgcacaacacacatatgtgggcatatacatatatacacatgcgcactcacaatagtcagaaatttgaccttattatccgtggtgtttagcaactctttaaaattttagtaatacatatatattttacctgtttgcttatatatctttcagtattttacataatccttgtaagctaccttaaatcttctaaaatagaatgggttataaatataaaatgtaagatttaagacagagacttccaggcaggctttgaaacccagatggaggaaaaggctgcagcaaaaacctagagaagagtctggagaagctccccagaggccagaggctttggactggggtgatggaactgccctgcatgggctgcctctggtccttgagggggtttcagacacactggagagaagttcaaaggtgtccattggattgcacagccacactggaagaaactcaactgctggacctgtagacagagccttggggtaactacatggtgataaagatgtagcagcatgcaccctctgatacccaccactcatctgcacagagatatcagaagtcacctcaaagtagcaagatggctcctggtgcagactgagccataacctgattgagtagtaactattatggggataatatcttagaaattccttctgatacattttttcagtatctgtaggctgttttccttcccatagtccttccaccaatgatgccataggaatagggggaggaaatataccccagaacagggaaaaagaaagctaggacctagagcagcttctgttgcactgcaataactcgtggtattgagccctcaaatggtgcctggcactcaactgagtgttttatgtgttttcatcatttaatctgcaagcagccctatgggatggcaatattatacccattttatggatgatcacatggaggaagagaggagtcagataacttattcaaggtcatgtagctactaaagggtggagtcaggatcccaagtcaggtgtcctgactatagatagcacccttaatccatgaggctccagggctcacacaggaatacaaataaggaagcccttctggttcctaaaaaatggtggaaagcaggagaggaaagcaagtttgtaactgagtgctagtgtcccaccaccccaccttggggttgggaaaggttgtgaggtgtcatgggctttgagacgtctagacaggtttatgggcacgggtgtgtggagaacaccagcagacaggaccaggcctggaaagggacttcatggggagcaaggtggcagtgtataggcaccccatggcccaatgaactaggcaacccagcctcccctcagtgtgagtgggggcaggagctgacagccacatttcatgttccccaccatgaggatagctaggctttcctgcaccccactccttgaggttgtagaagagagtgcaaatgatcctgagtacatctgcaaagagattctttttcatgggaaggaatggaattttttaaaactttactgtatatttctgcctgccatcgatagagctggaggctgatgaacaagaaatcaaactgtagaactgttttactcagtatggtagccaccagccacatctggctgccaagcagctgaaatgtggctagtcgcaactgagaggtgctgtcgatgtaaaatgcacccttgtttctgaagacttagtatgaaaaaaacaagaaatgtcttgacaatttttagtctaattatatctttaagtggtaacactttggacatactggaataagtaaactaaatcgttaaaattaatttcacctgtttttacttttattgatgtgactaaaaaattttaaatcacctatgtgatttgcattatgtttctattggacagcactgttttagacaaggaggaaggttgtaaaaaaggaaaagaaggaaggtgtgctgtttgcacatctcactgaactgtgtgaatctgtattgcataaaatgcatctaaagaaggaatgtatccttccagaggcagtgtttaggcaggttctttttgttgtgggaattgagaccttctcaggcgactggggtggggtgtcgtggaaagggcctgatgccagaaaaccaggggaagccaaatgagccagccttggggggcagggaggtggagggctcaactagggtgggctcctgggaggccaagtgctgaccccacagccagcatgcaccttggaatttctttgtgctcagcccctgtctgcttcccactgctatctgtactcctctccgtatattttccttcatctgagctccttcctcttctctgcttgtcccagttctgtcttgtgtcttccctgagcctgggcttctcctgctagctgcctcacacttgcaggtcttggttcctactttcgatacaggcagtctggttagtgtgattgattcactttttcaccaggacgcgtatgggccactgacaggctgcgggtgtcagccctggggtccgtgcccactccagtccactcaatagctcctcctgtgcagatttcagtttggcatgtgcctctgagcagggtaaaggaagttgggcctggtgggtactgtggttgattgggggtgaaggtggttactcacgggaatagaaacaaagacttcgtccaccccaggaccattctgggaggcagtgctcaccccaagtgacacctgtcccaagtgacaccaagtacattccaagggtgcagatgaaggcacagcccactggagcctgggccactaaatctttaaattttatcctttattcccctcctctctgttggataatgtgaaactccatgcaggtggtctacagggagagggatgtgctagtgaatctaagtaggtattctggctacctggataagtactaatttcattcaaaagcaacacattggcatcttggtttacacataagtctttgtgaatgttgttagcatgagtcaacccccctgttaccacaagctgtgggtctgacctggtcagggtggtttcatgaagcatggcaccaccttagcaggcttcccagaagccctccaggaggtcttagcttgtgatactctccacctaagatttaagaactccttcaggctgaggactctttcacttgctctcaatggcaagttttattgttccatcatcatcatcatcatcatcatcatcatcatcatcatcatcatcatctctgttatctccagaatgctcctgtaggtttgggtgatatgcactccttgcttgtggccccagaagcctattctattaccattctaaatgctcattttttcccctgtgtggtaagacttgatgccagtgctttgtatgtgtgtctgtgaacactggcagtggcacgtgggagggcgtgtgggtctgccatagctgagtaaacagggagaatgtatctgatgtccaggtaattactgccgaacatctgttaaatatggggtctcattgatggctggcatgttagtcagggaagtgatggtgtgtttgcagtcaacatggcaagggatgatttaaaatctgtttccatcagcagcccacagagcagccccaacgtaaattaaggagcctggagcttatgtaacctgagtgccaaatcacctccagaaagggctgcaggaaagcgtctctgctctggaaaggctgctaaaaataacactacggaatgatagaccccttggagctggtcgaatccacttatcctgctgttgaggacactaaggtggagcagggagggaaatgaccacagagtcaatgacagagctggaaccaaggccagctggccagagtttccagccaggacagccccacagtgggtccccagagcccagcctgcctcagtagagtcccgcaggggcacttgctgaagatacggggccccttcccactgggtgagtgagattccctggggtggggcttcagctgattctgccacaccaccacatatggggaaaactgcttatatcacagccaccctgccctcacggtgactgaagtgagctgagatagtgggaccaagggaagcaggaattaagggagatttattctccagtttatagggctttttctttttcctatctacttctgagaggtggaaaaacaccttggacttctccctggtttcttgagtccttcttatcaggatctctcagttaactggtttagattctgacacagagacatgcagtatgatattttctctgctccttgtctctttaattgcacctccttcgatctcattgtttgatggtgaccgaccggcagagaagagttccttgcaaacatgatctcagggggagttaatcaggaggattaagggaaactcaccttgggcagcagccctcacccccacagccatcctgctggatgttaacttgggagcagaaagagatttctagcttgttcaaggccattctggccaaggtgtgtagcagatctgggtcctgatctgggtccagtggtctcagacttgggatctctagagggttcatcccagggtgttgctctatgaaacctggtgtccccaccccctggctgagaccccgttgagccttctgctggaacctacagtggctagtcacagggcttcatagcatcttccctctgagcttcaagaccctggcttctgtcctcatggagcctgccagctgccccattaggacttttaatttctcctacccaagagcaatcattcatccaattaacaagcagttatttttgtttgcccttttcaggttaatgattttggtcagaaaatcgctaaattcattttttgactcctcttccataaattgtataaatttctaggtgcatacaaatttatacggccgcaatcataatttggtatcttgcttttattctcttcatcattttgttgttaatcttttctttgctttacataacctctataattttcattttttgatgtctttgtaatagcccatccagtggctgtataatatttaactattccccagttttgtgaaactggaaataaatatattatgtatttcaccttttttcatatggttttttcttttgataaacactgaagattgtatattttttgaacactttttagctgttgaaagtgcagagctgtgtcatattcagctgtaacaaaagagaaggaagggacacacacacacacacacacagacacacacacacacacacacacactctgggaaaggggcacagggatcagctgacccctcagccagtctcctgttctgggagcatctccgccatactcagtgttaaggactcttgtgttaaagatgcgtggttttcgtgttctctggcacctaagtgtagaccaactgcttcgtctggtacctagccaaagaaaggggccatctgttcctaggctggttggagacatggaaagataacacattatctccagcacagtgccctccttagggattttcaagggcagttttgactatatgcaccttccaccctaacactggcataagaagcaactccactttacactttaaaaaaagatttcttggccgggcgcgatggctcacgcctgtaatcccagcactttgggaggccgagacgggcagatcacgatgtcaggagatcaagaccatcctggctaacacggtgaaaccccatctctaccaaatatataaaaattagctgggtgtggtggcaggtgcctgtagtcccagctacttgggaggctgaggcaggagaattgcttgaacccaataggcagaggttgcagtgagccgagattgtgccactgcactccagcctggccaggtgacaaaaaaaaaaaaaaaaaaaagatttcttgacgctgtcctgtgactgacattagagcatctcatgagtcattgcaacccccagtagaccctggctcatccccagatttaataggtgaaagtagtactacaaagttcactgtttcatttgcacgtgtttgctgcacgttttgttttactatgtgtgcttctctaagaagcacttagtaattgcctggatatggaagatgcagtgagtggaagagtacagggaagaacagggccccaggaggaaactggtgaactgtaacgccagttagagggcagggctaggtctacagatgttggaatcatagtgctaagggcatgagtgtggtgaggaatgtagcagggcataggcacatatgtacagagtgacattagtgttggggggcaggaaatatgaagagatgtcaagtagaaagaagataatgccattcaagagttgtcaagggccaggatatttaagcagaaagcagctgagtacattacatcagatgtggccaagacaaccagggacagagagagcaatggccaggagacaaccttggcaggcctgtttcctggcacagtggtatggactccacattttgggggatgaggagggaatgtgaatggatagggaggcagtgagcctccaagtgtagacttgagactttcagcaaccagacatagagaatttgcagtaccagctagaggaggcagacggatttcagaataaggaaagtcatgccagcttccagaaaagaaaagctgaggaaaaactgtgtgaaagagttacggaagggatgggagcggggagagtgtgagggactgagagggaagataaggaaacagggggagaaatcagaccccacagaggtgggaaaatgtgtttagtactgttaggctaaaataatagcttgtttggcatcgggggagggagagcatcaggataagtaactaatgcatgcagggcttaataactaggtgatgggttgataggtgcagcaaaccactatggcacacgttgacctatgtaacaaacctgcatgtccttcacatgtatcctggaacttagaataaaataaaatttaaattaaaaaaaagagaatagcttatgtgttaaatggccctcaagcttctcccacagccaagcttgggtattcattttggaggggtgaagaggagccctgaaacacatgaacttagcagcctcccatgaaggccttagggtggggctttgctgcacagggattcccgagaacattgatcttggccttcctgtgcccctgtgctcagctctcagatccccagatcttcccaagcatcataggtgagggaagggggatggagaggcccatgggcaaagcctcctgagtatctagcgctgggctcagggctgggagaagcacctggcttgctgggcagctctttggaggcaggaacagttggtgcaggtttggggctggtgggggatgatggagagggacagggagagaggaagagcagtttgagttgggtccaaagaggttagcgtactccatgggtgcatgggtgtctttagtttgtcttcatggagccctaaaacagactttcatatgatttaaccacagttctttctctgagggtacaacgctgcttggtcatggatttatttttctgaacaagctattattcctcattttgttcaaatcttgtaagctcaaaaaaaaaaaaaagaaaaagaaaaatactcaattagagtaaaactttaattaaatcaaaacactaattaaaatatattgtcaattacaataaagcactgattaaagtgctcctaacaaacagcagccaatactgcccaggggtggaagctccagccttggttgccgtgtggctcagaggatctggctggacatgttgccgtggccattggtgtttggggatcaagaatctgaaggctggtcttgggccctggaaacaagacatcccttttgctgtgtcctccaaccccacagcacagttgatgaccctcctgttcctcctcctggagccaacaggggctgtccttttggggcccagtgtaagaaagactgtacgtcacacacagggctttttgtgtgccacgcctggaatgtgtgccacactggtgcccagtggaatttggggccatcctcagtggtacggcttttctgaaaaccactctgtgtgtgtggctttgctacagggcttcctggagagaagctggggtggatcctgcgttcccttgacctggcactcatggcctcatgccacctgggttctcctacctgtcttctctcatcttcccccatgcctgtgcacacactgtgcacactgcctctattttctgccacagaggtttcctagctaactggtaaattactggaaggaataaagacgtttctttaaagctatccctggccacagtgctccccaaggccctgttaggtgcatcttcccattgttcttgtatatctgccggcctggactggcctgtttcgcatcatactgcaattgcttatgtacacagccagtgaaatatctttgtagaagtcaagagtttaagttaagaaataggattaactggccaggtgtggtagctcacacctgtaatcctggcactttgggaggccaaggcgggcagatgtgcctttcttttaaacctcatgtgcgctttctttcaaacccagtccccttaagtggcagcaaatgccaactggaacaaaagaaggaagaaattaggtaaaaggagaatcaatactggtgctaagtttttaaagacttaacagtcttttactatacttggtttgagggaatggtagctattacttcagggctcttggagcaagtttttagaaagaaattcaacattttttcatttgctctttcaccacaaagcctggaaatagaagaggtggtatagcctgcaaagcatggctccttctttcttgctaatgttgcattgtcgtacccagtttcatatataaagtggagctcaggaaagccaggcctgccgtgctggcatcctgttctgtccagcttcctatgccgtagactgctttctagccctggctcctggggagttaaagcagataataaaagtgggaaacttggctacatcctcttcacagccgcacagtaattttcatcagggaggctggtgatggtggggttcagggacagaggggtgggaaatctacagcatacccgctggtgtcaggatgatggctgtctcattggaaaaatgctctcaggaaagtagcgcatcctgtcctctgtcctctaagaacaacagagacgatggttcagctgcaaccctgctccctagcacggggcctttgtatgttttatgtggctccaccagcctctcttctgagccatcactgcagttcatggcttttgtgtggggttctattcacctcctttcttttcatcccgttttatgggttctgaaacatgctcagccatcctagtgtcaggagaaggttcccaaaggccaggggtctcattccaggccatttggaagtgtcttgacttcagaaaggggctagcctgttttcttccctcaagaggcagcttgccttccctctgtctggatacctgggcacacacattcctgcctttgcaagccccttctgctctcctgctgtccttggccttttctaaaccttgtctcaggactgaatgacaatcctctctcattctgttttgccctgtctccctccctccctttttctctcctcttaatagttctatttctctactaagccacagagtcagagtaaaaagacatcagtgaacctgaaggagggaaatgaattattttatctctctgaaaccttttcctgcttttgcttttctgaaaccgttttctacttgctttccataagaaccaaaatattgcggcaagtgggagacaatctcatcatggctgtgaaaaagagggaggcaatatgtcagggggtagcatggtttgtttcttcagtggagcagatgtttttgcaatacccatttcctgccagcccaggctgaccgtaggggaagtgaatacagtccacagggctgtcccggagtggctcacatccaactcccagtgcatcccacagacctggagtccctgaatgggcctctaagaggtcagggaactgagatgctatgtgtgtcagtgaatgttccacgaagaatttctacagttttcctcagattctcaaaaaggttcaagatctaaggctggttttcaaaaacttttgactatgacctatagtaaaacatacgtgtgtgtgtgtgtgtgcatgtgtgtgtgtgagagagagagtgtgtgtgtgtgttttctggatagatatctatatatctgaaacaaaattcccaaaacaatgcttaccctttctacatgtaaatcaatgtggtattttctattttgttctcctttgattatattataaactatcttatttcattgaaaatactaattgcaacccatgaaatggatttcatgtctcagtaatgagccacaacctgcatattgaaatacactgatctaaaggaaaatgttaggaatcactgatctgggggctctcatacatcactagtgggagtgtaaattagcacagttcttaataaggatcttttggcaatatctatcaaatttacaaatacatatacccgttgaccctgatgtttcatttctagtaatatatcttacagatattcttatacttgtacaaaattatattcaagataattctttgcagcattatttataatggcaaaagattggaaacagcccaaatgtctatcattatagaattagttaaataaaatgaaacatcagcacaatgaaataaatctgcagctgttttaaaaaaaaaaaaaagaaagaaagaaaggggcactctcagtgacctgactggaaagattgccaagatgaataaagtcaaacaagcaagatgcaaaacagagtgtttcatacgttaccttttggatgaaaaagctagtaattaagactctttattcatatttgtatgtattaggttcaaccatttgaaattgccatttttaaaggttaaaacggttggatattgggaaattcatatggttcaacataatatatgcttataggaaggggaagttaagaagctacgttatctggagaaaggtaggaggagacttctcactgggacttgttaaaaataaggaatctctgagcagatggttaacgggaaaggaatgggggtcaccctgagctaaggcagaaccaaaggcagccccatgccagagtgaggggtgagcagaggctgcctgcccctgtcctgattctcctctcctgatgcctgagtcccagggaaggtcagccttggacagtgggcaagaggctgggaaagctggaccagcagctgaagtctgcttctgtctacctcctttgtcatttcctctttctagatgtatgtggaagatatggtgaaaatgattgagaagtttaacttttccaaatttgaaattttgaatgcaattgtatgtgacaaagaaagagtcactcgaggagtactgactgctctcggctggaactggtgtggctctttacttctcagaggtgggcttaagagggtccaagactccagaaagctgcccaaaggccatgcccacttctgtcatgcccagtacctgctgcctgctgccccttcctgatggtcaagctctgtgggattcctaaggtcctagggtcatctgggaaggtgtcttgagtcattggccactgctggagtgggggtatggggacacctgggaatagggcctggtctgtccactccaaagcccttgctgatgtctttttcaggtttccaatgccaaggaggaactctgggcagctggcagggtatttagctaggtttttgcaggacatgcagcaacatttaccaaggcacttcaccactttgatgaaacaaatttgttttcatcagcatgtggaagacagatccatctctccaggggcagaggcacatatcctaggctcccagagattcacatatgggcctagccccgttccttcctcaccctgggagcagaactgctaaaggggagcagataccctcttgcccacacatctcttagaaaactccacaaggacagaaaatcaacctcagaaggcctttgttaagtaggaatctgagctacatgggccaacctctggtcattgaacacattgagcagcccatcgtgtcactagatacctgggggctgatcccgtccactgagaacggacaatatgtttgtatagatgggagggggtggcagtgctgggagggccacagcctaattgcctctgagaagcttctttttatactctaggtgtaggccaatccctcttgtgggtcacatttcttcatgagccttaggtatgcctttaattcagttacagttgattctagtggacagagatctttagtttcccttcaaaaacactatgtgtggatgtctaagttattcatttaggggaggttttactctccctctcattttctgcctatgtcatacctaacaccccactgctcaaatgatggaaccagcatttggactatgctcagtaaaggggttggtgccatcccagtgggtctctgtgcagttaatcaggacatgctgggcagatggagtggagcgtgtaggagctgggcaggggccaagtaggaggctgctccagtgagcagcccaagggcctaggtgagaggaataagcaggtgacagggagtgagaggtgcacttggcctggggaaggaagaagcaacaggcttcagcagtagaatggctattagaagtaagaagacagacatgactccagcttcaacttggtgatggaaaatgggatggggaggagtcttggagaaaaaacaccgaatgagttcaagattgtattccaatttgacttatgatggggatggaggttcccattctccatctccctcagcccctattacccgcccttggcagttcacttcaagtttggaattggagagtagattggcctcccaggtcattgagggaaatgctgtgggagttgtgtgctggagttctcgcctcctgggctctggaaccaacagtttcttcagtctgtaatggaaaaggaactgggagaattgggagagaattggaaccagcagagggtatactctgaggacagtaagtaaagacctctaagcatgaagttcagggagatttgaagaagggactctgattccaccgcagccatggagaagactagggttagatgagtcactgatggatgagttaaggtttaatgaaaagatacccaattctacttaagtgcttatctttctttgcctcttgttcttaaattatgtatcagatttttaaatgtggacatgattaatgctacttaagatctctggttggctgctctatcaaagagttatattttaacttaaaatgcataactgagaggaggctcttaccattttttatcagttaatcacttgtgcataaagctcagctgtttggaccctaaggccatagatgggggcaccactgccctatgggtggtaatttaccctcattaccacagggtagtttggagaaaatgaactaccccctaagtgttgctgctgtaatgtgcaatgaaggttacaaggaatacagaggatcttatgttcttccaagaaggaaaattgatttggaaggtaaaatgggagagaggaagtaaggtgcttatgccaggggagggggtgatcttaatctccaggcacatcagggagaggccatggagaagctgatctttgaagagggaaaggatctcagagggcttgagaaatggaatactgagtgtgagactgactcagttcagttcagtagatatttattgagacctactatgtgtcaggttctggagatacagacaagaaaacaataagacatattcctggcttcaagttgtgcaccaaattatgggaaaaaaagctgacaaacagtgaatatgatacacttgtggcttatgcaataatagacatttgcacaaggcacaatagggacctccagatgggaaaataatgaatccatgcagtgggccttgctgtcgtgctgtgcccactgccatcctgtaccattgccgcttgatgcatttgaggttctaggcctgcagggcctgataagctcttacctgagacaagagtaattggattcaaatcctatctctgcctcttacaagttttgtggccttgggcaagccacttaacatttctgtgcctcagtttcctcacagtgatacttcacagggttgtgagaggattagatggtgttacatagtgttagctttgatgatgatgatgattttgatgtggaggaagaagaggagtggaaagagaaataatctaggaagcaaaactggaagggagtttttagaggagaaaaagccaggcaggtgatagagagcccaacccacttggcttaagcaaacagggaatttatcaacagtacactgggaggattaaacagtgccgtggatctggtttcttgttgcacctctgttggttgctctctctgggctgatgccattctcaatagactctgcatgacctcaccatgatggctgcttcctgggactacaccttccgggggaattcagtgggaaataatagcaacagtttttttcatgctctcccaggaagagcccttggatggaccgtgggagggttaagtctatgtcctatgctgaaccactcgctgaggtcaaggggatgtgatgccctggttggctgagtgattggaggccattcagctctggtcatctgaaacacaccctctgcaatttccacctctagcttcttttaatagagcaagaactttaagactctaaagcaatttgagtgcaaactctactagatttttaatgacattttgtttctgatcttttagctttgtcttactctatacaaaagtgatagcagtttttttttagcaacttgcatttgttgtgtctttccaaagcattcaatttattatcatagaagccacagctctttctttttacattcatgctttattggtttattaatatttaattaaattaagtatttataatgacaaatacagctggcaaacaggtgtggggacaaacacagcagaccttgggtaagcattctatttaactcatggggcacacatgcaaggctattctcgagccattgcagggctgtgagcactgggtctgtgcattttacagagcacaaagaaagagcagataagcagaaaaatcaggtaaggatatttaagagagttattagtgcttgggtttcttttggatggctggcatagatgggttaattgcagtggttgttgagagagtgagctgggtctatatgggagagaaggtgagatcaggccttcctgaggtgagccaaagtccagagagaggcaagaggacttcggcccacatctagacctgatgaccagggtcttcggccatctaatctgagcaaggaagacaccccgggcagagttcataaggtcagggtggggttgttaggaaagcatagatcccagcttccccactctgagtatatttaatcagggcatgaagaaaaggagaagataccatcctctagccccagatagcagaacaaagcaggaagtagccccagttcacaaaggggagttttcctgccatcaactggggaatattcagaagcccacttagaaaggccaggagagaactgattcttttcccagggacccaaccagacacaacaaattctgaatcgtgctggaccgtggacacagatcagcaccatgaacgctggcgttatctaatgctgccccagattggcagcacagcctgatatcaactgtgacatgctgggacaacctaacctccgaaaaccccagccacaggctgaatagactcagaagttctgtcaatacaatggggacaaaatacctactgcacatagtgttgtgagggttaaacgaaatgcgaatcaccaagtttccagtacagagtaagtacttagtatctgctccctcttagccatgtctgcctgtttttatactgtgtgtggaaattgaggctcacagaagttgagcagctgccttgtttatatggcataagaagcagagtagagtcccaaagcttcctcttgtctttcaagcccctgcttggtcccttataccaggctggctactgtctgtctaataccttgggtgccccttaggcccctggagtgggtagcctgtgagccctttaccatgggttactacacactgagaaaggtctctgcttcatagtgtagtagagattagaaaagcataggctagagggaagtcataagaatactttgtcactaaaacaatattggataatgaccttttaagccagctgcagctcaaggaacctgagagcagtccagtaatgattacagctcaggacctaatgaagagaccatcacttatttataacattgctgctttcttgcttttattgcttgtgtgcccctgtgtctaggcaggtggatacctttcataatctgagcaataaatgagtcagtttggctgattctctaggctgggagggcacctggggtgagggagtgaggtgtttggcaggtgaggtccccaggcactggagtgaggggaaagaactgcaagctctggagctcccagcggctggctcgaagtggattcagtttccagagacaaaccaagtagatgtgaggttgttgttctgcttcttcaccattataataataatgaccatattcattatttattatttactatcattattattgcctttatttattgagtgtattgcacttcatgttccagggctttctgggtgatctcagccaatcttgggactttaaataccatctagacactgatgactaccaaacttacttccagcctagtctcttcactcactgcaaacacgtagcacccctttgtccttagatctctctgctgggatttccaagagtctcctccgccatgttatgtccaaatgggcgctgctcttccctcagtctttataacactgtaagtggcactatgttctactgggttgttctagcctccaaacaagggtcatttttaatctctccctcatccagaggctctgaaatggagccatgtggtagccagatagcttcataggaagcacaggatgctgtgttttcatgtggtgacacaggggtggtcaaactgcccttccctccacctctgttacttgcacctgctcttgctcccctgtagaggggatacttttttgctgtaaatttcttgactttctggtcctacctctttgttttccctctggtacattctgtttgttctgagcctcacctgatgtctgagaataagggacaacctctcacaacaaattgacaagggatgcctgtgttccgggtaactgttttgcctctccaggaggaagctgatactgtgtctgcttaggggtctccaggatatctcatagagcacagcctcagcgtggttaacccggactcttgtaagcacatttgaaagataattcccattcgagggagaggccctttgtgagcagtcttaattctctttcccattgcctcttctatttcttataatttggatctagtacaattaatcagactgtaaaggagtccaggaacattaagcagaatttgccattttcatgcaaagctgaaagacatggctatttcacatgtagtgattagacatttttatagccaacctgtcacattacacatcacagatttccaataaataaagcaaagctagaatgggggctgccagttgtatgacaatccaactaacaatatcgtggacagaacagtgctttcttgacatccaatttactcaattacatgagtgatcatgtcactccctgcttaagctccttcaatgtctttccataaattataatgaagggtgaataccttagtacttccccctccccacatcatgcacttatcacagagcactgtaagagaatattcttgtatgcctcccctaccagactgggcactccacgaggcagggaatacaccttatttttcccggtatcccttgtctagtacggagcctggcatcccaagaaaacccagcagaggtttgctaaatgaatgaatgactgaatgatcaatttgagatactgtagacagggacggggatggaccggggaatatctcatggaccagacatggctcatgttttagccacaattcacacagtgacatttctagatgtttgatacatcacctgaaattttctatctcagcatagactcttaaactagagccattaaattagaattatgccattttaactacccgtgctgtgacagagattgagagatcatgcacaagagagaaaaaggaaggagggagggaagagagcaagagcgagaggttatgacagcaggcttcagagtgagtaggggcaggcagtgattcctctgtgttctgattcccttgtgcttgtggcctgaacatcttgctgctctgagtgctattaaggatttgtaatttagactgggcttagaactgaattcaccccacccattccccaagtaagagaaaactcttctagtgtgtatctgacaaatttatatgacctagatggtttggggattcctgctggatttatcagcattctaatagctgacaactgtaattgtctttttacctagtctgcatctctgcagtaatagtgtatatatttattggggaaatatggctgcggggacttgttacacgctgttgttaatttacaaggttcttctttgagctgtctgtcatgcaccgagttgatggtcttctccttagtttgatttaactccaaaccctgcttgctgcccttctagagaagcagggtttgcacggtagtgccatgggccagagggccctggccacgcatctgtgttagcaggtggggtcagatggcatgtcctgtgatgatgttaagaagggaagttggtatgaggtttagggcaatggaggggtctccagtgtgggttggagaacaaaaaataaatgtgaacaagacgtgatctctcttctactcaacttcaggttctagttttggtggagtaatcctattgtgaggtcatggggcagtagtttgtcactcaggttagcaaggagagactgagaaaggagaatggggaattctcctctccacaaaaatgttgacataagcagaaattcagctgcttccttgggttggttcttggtggaaacttaaacatcagcagagctggacagactgtgttcaccagggtggctgagtgggcctgtggccacaagatgatcacagaagcaaacagacagaactttggatattctttaatgtaatctcaaaatttgggttttttgtggaatactatgcagccataaaaaggaatgagatcatgtcctttgtagggacatggatgaagctgaaagccaacatccttagcaaactaacacaggaacagaaagccgaacaccgcatgttctcactcataagtgggagttgaacattgagaacacatggacacagagagggtaaaacaaacaccggggcctattggggggtggagggtgaggggagagaacttagaggatgggtcaataggtgcagcaaaccaccatgacacacgtatactgcaaacctgcatgatgtgcacatgtatccccccttttttaaatagaagaaataaaggaaaacaaattttgggttttgaagtaaaatattcacttgaaatatcggcaacagattctaaaaacattacccactgcactgccatcccccaaccccctcaaggtctgtgagcagcattgggatggtgggtcctttggctcctggaggcagcaggctggcctggatgaccggcaagactcctgcattgacaacctcgtgggtgggcagtgactctccacttctcaccagaaagcacagagatcactcctaatggggagacatgtgcctctttcttcttgaggattgtcaggaggagcattcccaatgtgtgggctgtgttcatgattgtagttacccgatgggctatttacagagtgtgggcctctttctctgcagtcattgctaagccctccctctgccttcataccaggcggagcttgcattgctatccgcctctctcaagctcagagtcactgattcggtttgagggagacagtcactttgttaccttttcccatggttgtctgatttgggtagccagtgcgtaaggcttttgcatcacttccggggtactttctagagctcagtcctggcatacttaggaactcatctctgaaggaactggcctcttatggtgcttgctggcaccctgacagaatctccaggggtggagggccctgacttgttgtgcacggcaaggaagcccagcagctcagctcagagtccaggcatgtggctgtgctggttggagagaagccaagtgttgtccctgatctctttctatttgaatcagccagaaacaactgacctgcccacctggtgtctcaccagggctttgtgttggcggacagaggggagcagaaggccagctgggagggagagattgggcagatggaggcactaccggcaatggagacgggcatgtgggcagtatgagaggtctcagtccctgtgtcccctgtggaaggcaggagcacttatggaactgcagggagtgaggagcggttgatggcctttagaagcccccagggaaacccggatggcatgatactgtagaactgttctgccccaagcctccacattaatggtgccatggtcgcaggcaagttcctcagtacttctgaactttagtttccacatcgctaaaatgtggataataactacctctcaaggtggtgatgagctaatgtttttgagcgggctggaaacaccatagatcgctgtacctaagtgagatgattattgtgtttacctatttttattccatttctcaagtacttattttccttccaagtctttaaagcaaaaattttaaagacatcccaaatagaataggtcagggaagtggccacagggcctcttttgagccttgtcatctcctccaccccctcagtagcctcccagcatcccacctgacatcccgtgagccagcctccactcagctgccagagggagctttctaaactgcacacttggtcttgtcatcatgctgctttgcaactttcaattcataattcagctttcgcatgggaaatatgcactgagtcgtgtgctaggtagggagcttgtaatgagaagatgatggggcatagtcccatcctccagcatgtggtctagggctcctcagtccctgtgggataagtgtcatgactcccatgtcccctgcccacttccccagccttatccttctccaccccttcctcacccacatctaggttaaactcaccagtgatgattggatagtgtgctgttctccaaccatgttcaggctgatgctggcctccccatctttacctgcacatctccaagatgtcctttcttcctccttcatccctgttcatttgtcagtttcttgcccagcctgtagggctcagcctctgtagagttgcaagtgatggaaattcaactcaaaacagcttaaaggaaaaggaaatttattgcttcacaaagctgaaaaaaatacatactttctgacactgctggatccaagtgctcaggcaacacgagggcctggactctcccctcccttggctctgctctcttctcagtaaggttcatgcttaggcaggcccctaaggcagtggcaaagacagccacccagatgttcagatttgaaatggagacagtacatgtcttcatagtgccagcaaaaggctgcagggagaggctcagtaggctggtttgggtcatgtggctaatggttatggctggggtgataggtgaggatggcgccaagtgtttggggtaggttggggagggtatgagcctcactgagtcacgtggactgaaagtgggagagagtatactaccagagtagaatcaggcactcctcctaaagaaaggggctgtcaatccagggctggcaaacacatttggttctagcaaaccttctttgactgctcccaccttccccaagaggtctgcatgcttcccacatgccttggtgctgtaggaatgaattcccagtggaatgaatttttcctcatgcacatgtgttacattgagctctgaatcctaccacacgccccaggtcctacaccccatggggccttggtacctgtaagcccactgagtgcatgcccagtcttagactcatgcataaatagagccatgctgagcagagtctggagttagatggcagacctggggtcatggtcctggcaataggcgtagacccttgatgaacacactggtccaaatcctgtgggtcctgggatctaggaagatccaccattcagggtcactcctttgtgggccaagaaagtcatgtcacagacaggacacctggagagccttagcttcagatggtaatgcagtgcagcaaggatagcaatccaatagcacaatattgtaggcgctgggcccttccctgttattttgggaaggaagacagtcaaccctgttgctaagccccctgacccccacagcagggtcagccctgaagctctatctctttgtttttgaacacctgtccttcttttcctatgaccctcaggcctccatattcaaccagttgctgctgggtggtttgctgaacatacccatgacaccaactttcccaaagacactaattccagaaacagggtcaccatcggtcaggagataagccacaagaaaattgttactgacaacaaagaaactaggtttgtgaataatttacttctcttataaatggtaagggttcaaagttgttccctataacaccttccccctctcactgcatgtgctttcctggttgggaaagaagagggtgtttctgctatagaaagctgggggctgtgtgttacctgcagcctgtcatacccgtggtttcggccccataacctggagggcctggggatgctgtgccaggcttgtcagtgtcaccccaaggcagtgagtcaggccagatccactctctagaccttcagcaagaggagtcctcttccactgagctcccagagcctccagtgctatctggctggcttccaggtgaagtcggagtgaatcccacacagtccctgggagcggtggctgagggaagggtggctcctcctgctctgcctcctggcctgggctctctctgcatggagattaccccagccttcccccggagggcaggcactgagtgtgacaggttttccaaccccagctgaggacggccttgggtgctgaggctggaacttcctgggagaatcttctggccccatctctatggagccttctgagggatatttgtatgttatgaattaagaacaagttttaggctcttctttaagcaatttcttaagaaaatggctcaggtgaaatatagctattctgaataattcattttctttattccaaacttaaatttactctactcttaatggagaattagccagatgtggggcagggatatttggcagctcatattaacattatcaaagaacaaaaatggctggaaaccctttgaattagaaaccctactgactattgatagaggagactggctgaagaggtcgacatcgtcatcccctgctagagagaagatagctcctctcctaaggttggatgagtcctcagtgctgaggactgggctcctggggacagagctgtctctgctatggcttccttggcttccagggagctgatggaaagggaagatttggcctctttgtgacaactgtgattatagagatagacaattttatcaatcaggagtctagatgcttagaactgggagggacttttggtgccatacagcccagtgttttctgaacttctgttcacacaccaaccaccctgatgaatttttgccatatgggtttattgtctgtaccattattgattcacttttttaaaacttcagtgtgttcatttgtaaaacagtcactatggtacatgggaaattggacatatgcaatgaatagaggacaacttttgatgaaaaaaataacactcgctcttactaaaatctaaagcctgctctcttgtttttggataataagtgtttgagaggtgttaaagacacaccatactcctgccaagactttctccgttaagataatcagagggatggaaaaggaagttgaaaggggcatgccactccatgtgatcttgtctggtgcacagtaaaatcactttgtaagtcactagtggtgcctgactcccttcctgcacccaggaaaccctcctccccttttgcaggaggcgtgactaaggctcatacatggagtggcatatccaaggtgctcagagctggctagaggcagcacagaatagagcccagctcttaggattctctaaggaactgaaaccattgaatcactgctcagcctgaaaaaccaaaatctgatccaaatcccaagccaaacccacttgccaagcacagatcctatcaataaatgaaaagaatgaaggccgggcatggtggctcatgcttgtaatcctagcattttgggaggccgaggtgggtggatcgcttaagctgaggagtttgagactagcctgggcaacatggtgagaccctgtctctactaaaaatacaaaaaaataaaataaaataaataagtgggtgtagtggggtgcaactgtggtcccaactactcaggaggctgaggtgggaggatcacttgagtctgggatgtggaggttgcagtgagcccagatcatgccactgtactccagcctgggagacagagcgagatcctgtctccaaataaataaataaatagaatggaaattcaatggaggaaattggtcctggcattagagcaagggaatctagtttgggcaaagttctggtagagataagacaggtctgtagtgttgcagaaaggtttatatcaaaacctagcctgatgccatcaaaatcagcaaaatcaaattaaaaaaaagtaggggttggtgaagtctagtcttaaataaatttctacaaagataaagaaagtcagagaaataaaataaatgaggccagaaaaaaacgatcaacataccctagaggatgtctcagacttaaagaacaaataataaaaacattctttgagaaccctgggctccagttgttttattatcaatgccaaatgctggagttcagtggccttccctgatgctgcactttcctcttctttctcagcaactgcaccttttgctcagaggctggaagaaccctctgggaagaagcactctgcttcagtctgaactggcccaagggcagctggtcaaacattacccatggagcaaaagggagacaacaatggtgctattctccagctgttgaacagctgactggaaagtgtgaggatgtaatgtgacagacccgggctgctttgccctgggagatctgtggaagagtgttccttcaagacacttcataacaccttaggattataaaaaagctcctgggtcaacaaaggggctttggtgaggataccttcagggctggtttgatgactccatacagggtacttgctgggcacttcctataggaggtaaagactagttctgctctttcctcctttgtccattcctcttgtcactggcctgaaatcagggcaggcactctgtggcagctgcctgttgtcatcctaacaaggagtcccttcatggagactgctgtagccccccgacacagccaagagatgaccccaaccacttccaagggtgtggcattgagggcccatcaccagaggccacaaggccagacagctgggctcataccactgctcagccaagattcatgttgttggaccaccctctgagcacccagccaatgcttgggcagagcggtagatgagcatctgggccttagagccaagctgtgaggctgagggcctgcggcccttccaggcacactcagaactgatgagaatcccaagtgtgtcttcacacgcagattaggcagccaggaattgggtttctgggtcttccttttaagagggatggaatattatcgctttatctgtgagaggaagagatgatgtgagaattacatggccaagggttctgggagttgggatgcagttaaagtgaataaaattgtttctcactggagcggcaccatttccacactcaccttggcagatcaaggatagtagaggggacttggtcaaaaaagtctgagcactctgttctagtgggggatttggggtagccaaatcccccactagatgtgggagttgtgctagttgtgggagatgtgctagttgtgggaggatcttttgttagcgatggcccagagcccttgtatgctgtttccaaagcaggaaacagcatctcctgggaggcagaggctccaaaggctctgtgggaagtgtaggtgtgtgtttcatgtgtggatgggtatgctggggtgtaacatatatgttgcagtatgttgtatgtagatgtgtgcttggcaggacaagacatgcaggtatgtgcaagcagatggaggcatggaattgtcagaaaggagaacccgagaagcagagcaaaatgcagaccccaggctgacttgagcgaaggtgccttagctggtgctggataagagaaacctccattctaaagccgcctcacctggggccccacctgctgtctcagactgatgcagctattggaaagacctactagtggagactgatggataaacagctgtagagctgggttgaaaggggtgctattctgaaaggatctctctttaaaacaggcaagacttacaagagaaagaggcctgacaaaggggtgctaatcggtttatggccttcagcagacatccactttagagtgataaataaatgaataattgaaagggaggaagaacctcttagactacatcagtcccttaacacaggcatggatcttatttttaatccccagaattctgactttttaaaaagaacttggcttggcaggcagtagaagaaaatgtgtgagtgactgccatgacatctgaccatggtttcatgcagtttccatcaaagatgactgagcaaatggaaataagggttcacagagggttaataaagctttattgcaaaaaacaaacaaaaaattcatggaatgaaatgataatgggagctgtccaacaatattatttgggatgcatccaagactgtaatcagaggcaagctaattcagtactaatttcaggaaaaaagatggggaaaaaattgataattagaaaagaaaatggaaacactagaggaatcatatacacataaattaggtcccaaaatactggcgcaattaatcatagccaggggtgaatcaagcctcatcctatcaggaagaactgaatatttcataaggtagacaaaagaggaatgaactgagaggaatataaccagccataactaaaagaaaaacttgtcagaaattaacaaccaaaatgtgagagagaaataacatcttcgttaaccagtggggatgaaaaatggactcagaaaatacaacaaatgctcatattcctcaaagccccatcttcttctattgaaattacagccataactttcaaaaatctttttatcttttctctcaggaccagaatgattcattgtatataaaaaagaaaagagaacagaggaaataattaaagctataaaaaattcccaattatgaagcatcagcgtccagatggccataacactgtttaaccatgaggaatcaacttgtgggtagggggagtctgctctgaaatgatagacttcgagacctgaacatgtctttctcttgcaatctttctctccttccttccttccttccttctttccttcttctttccttctttccttccttccttctttccttcttctttccttctttccttctttcttcctttcttccttccttcctttctttctttctttctttctttctttctttctttctttctttctttctttctttcttttctttctttctttcttttctttctctcttgactgtcacccaggctagagtgcagtggcatgatctcagctcactgcaacctctgcctcttgagttcaagcgattctcctgcctcagcctcccgaatagctggcactacaggtgcgtgccaccatgtctggctaattttttgtatttttactagagatggggtttcaccgtgttagccaggatggtctcgatctcctgaccttgtgatccgcctgtcttggcctcccaaagcactgggattacaggcgtgagccaccatgcccagctttgcaattaagctttcttaggattgaatgggaatatgaaaggtcccttgctttgctaattccaacatgttggcactccactttgaagaaggcaaaagaaaccattgtctgtttagagaagcagaaactggaaacatatccaaacataacatgaagaaatgaggacagtctgagacaaaagatccacaggcagacatgagtggccataaggaagaggagcccctcatgcagagtttataccaagtccctgatttgaacccaggctgaccaaaaattaaatgtcctgccatggagggtggtgagcattccgtcccacacagagatggcacagtctcttggcagaaaccttggggaagattcgagaactggattcaaaggtcctatttaatccttgtgttttaaaattctaagaatgcaagcctgaccaaatttaaagcctcccagaaagtttaagtgatttaagttgtgtttttttgaaggaagagagggttcctgggctaggttttaacaagtggccctcaaggtatgagccctgaattagccatcagaaaataaagtacactgcttcattcagaatgtatccgggtaaacaaggggatcacttctgttctgagattagaccttcctgagtaacctgtggttatcatggaggctctgtagcagttcccagtgaggccggagactcagagggcagatactgccctgccttagaggcaagaggtgggtgagtggtcagggtgagcactcttaggtaccttcttggtgctgggcattgtactaaattcacttcatgcatcatctcatcataactctgtgaatcatgatccatttcccccagtttaggaggtgaagaaatgcagccaccatgaatttaaatgacataagccaggccacaccaaggtggcaagcgggatggtatttgaacccaggtccatccgtgctagagctgtgtgccctgccccatgccaccacccattctggcctccatccctcagcccctgtgactatagtcagacttccaagccagtgatgtcaaaatgtccaagcagcactccagtgtgagtcaccactggctgagtcccatgtgctaaggctgggggaaagctgaggtaccaccttggagcatgttcagagagcagggatggtgtggagaggccgggaatttgaatgcttcttgttgggtaatgtactgctggaagaattctgggcatgagtgatcataattctattactttattaagcctcaaagaagcctttttgtatgcatatgcttattataaataaatgagtacaactttcttttaactctgaaagtatctgcttgaagccaaagctgctcagatgccattcctggggattgagaaattcgtttgatcagaaggtggtctatttttgctagagaatatggtggcttataattagttgggattcaaagacttaatgagcatcagacacatttctgttagttaagtaaaatatcaaaaattggcataaataagcaacaggataaaatttaataatactctttcctttgaaaagacttgaatgacccagaccacatttcctttggttattctgaatccttgcattttaagagaacaaggtatggggcacggtggaatactggtgtctgtttcctctgttatgtggattgagctgtgctgctgtgtgtgggcacaagggaggcaccaaactgatgaaccacaattgagcaatctacctatttaaacctgatcttaggacctacagtcagtcaatcagcaagcatttattgagtgtgtatgtacatacaggcatgctggagttgacagtgcctgagcggaaacatggagtggatgtaatgactcctttactgcaggtcttaaagggtgattttgtttggaattccccaagtcattgtagtaaagtgttttggattctaatggtgcaaagaatttcttctgcttttcaaaaagttagaagaaagcataagccatggtaaggagagacagcagatatttttaaaaggtccaaatagaacatctagagatgagcatctgagatgagaaatgtactggatgggattgatggaagatgaggcattgcaggagaaaggattagtgaacttgaagacatcacaatagaaacaatccaaaatgagacacagaaagataaaaggttgaagaataatgaacagagcatcagtgaactgttgacattaaacaacgacaacaaaatagtatgtgtataatgttaggaaacgcaaaacagtagacaccactgcagaatgaaaagcgatgaatggcctctctccctagtcttcacccccattctttccccagtgattatcattgttcccagtgccttgcagttccttgcaggaaactaaatatgccaacgtccatgtatttgagaggcagtccaccccaggtttgaggagagttgaccaagaggcaacagtcagatagttttctccagttctgtagctgtataactccctaaaccaatttccttctatagcatccaaggagttttgtggaacataattgtgagaagaaagggctccatagcggagaacatttggaaaacttctgggtcaacagaacccagggggcttagttactgttgtctaggcagagctccggactctggtggaggagagaacaagcagtacttcccaaccttctttgaccaaggaaccccttcaaggaaggctatgccctctcatgacagacttttggagaatgagtggcatctacagtgtggtgcgtgtgagcctgaagatgggcagcatgagagagagcacaggtgcccagaccagttgagagctggccaacaaagaacccagactgagcagtgttggaggctaaatccacataccaagtgatgcctcatggagctgagcatcggtttaagagttggttaattaaaaacaaaaagtttccttgggggaaggtggtgactcagcagcagttaaagttagttacagaaaaaggaaaggtgaagtgtaaagaggcaggctctgccccttgtggtcagcagaagcaggaggatgtgggggcccatttccacaagtgtgacagtagcaagaacagaaggcatgcttgttacctgtgtggtcctgttcacgtgtcttatgttttctgagccccagcaccatcatctgccccaaggggattataacctgttactaatatcttttgaacacttactctggccagtcattctctacgtgcttgacaggaagtaactgatttcttcttacaacaaacccagaagtatgctttttgagaaaactgagagacacagagaggttaagtcatttagccaaggtcacccagcttataaatggcagtgatgagaatcaaattcggagattattttctgccatacccatctgggatgttgcaaaggtgaaaaaaacaaacacggatctatcggatctatggcacagataaagtgatccctaaaatgttagggctttccttcctgtaaataataattttatggaacacttaatgaaggtattacttgaataaatattttacagctctaatagcatgtaatatttcttgagtactcactatgtgctgggaagtgtgcaaaccttttgcatgttttatcctaagctcacagcaaccctaggttggcacattaattatcctgttttttttttaaataggtgaggaaattcaggcagagggtgagtttgagtttcgtatccaaagtcacacaattagtgactgatggagctgaggaggcatcatgatttctgtcaaagaccagagactgttacaaattgattaaaattctgaatcacacatcttcccaaagagtgaattcatctgggaggaaatagggaaataggaaaaaaaattggagatatataatcatggagcaacagatatggggcagtggttctccattgctgggcaacacatcatctgcagaattagtggcttaaaacaataacagtttattcctcattattctgtgggttggccaggtcgtttctcttctggttttacttggcccactcctgtagctgcatttagttgtagggttgggagctccaaactggtctcactctcaggtctggcagttggcgctggctgttggctggggcctgcgttctcctcatgtgatcatcatcttctagtagactccactggacttcttcatagcatgatgagctcagggtccaagaagacaagactggaagctgtcaggtctcgtaagctcccaaattcacatatcactttcacatatgctattggtcaaagcaagtcacaaggacagcctggcttcaggaagatggagaaatatcatttttggagggaagaattgggaaagtcacattactaagacacatagacattgggagccattattataaccatctaccatgatagattagggacaaaaggcagccaggaagagaatggtatttgcatagaaagaacaggaagtatttgtttccatttatatcttttgatactaactcaaaggataccaaaacacctcattataaatctgaataatgaaaaagagttgtttggggagtgatgataaaggaaactcaagcttttgttgttttatcactgtaggatgattcattttataagttaagaaaaagttgaagattaatgagaccatatccatgaagtatttagagctccttgtaaggagagaactacatcaatattagagtaatcatcaaacagctatcaaaatgtcatttaagagaagacaggtactatttcccacttggaggaattatcttctgattttcagggaccttccagcctggatttgtgttgattcactttgcccacttctcttgacaaggagtagagtgagagcttttgcaagtttagcatttacaagtggctttgtactagggaaggacttgagcccctcttcccaaggagcgaggggtcagtgtgtatggaaggctctatctctggtgcggcccctctccctgtccttgaaaacgggtggcgaggcaagctgagcagagggaatcccttctgagggtgaggaaggacccttgacaagcagtagctgccctttcatcacaggggcagccagccagagcactgggggtcttccttgactgagtcggacttggggaaatgcacattttactggaattgaaacccacacagatctcagttctacacttacctggaaggtctcttctgtgagctccaagccatgagggagggggattcctgtagggcagctgaggacctgcggtgaaagctgttttgtgatctgatgtggcctatatccctagtcccttcaagagaaacatgcctttttctgggccgggtgtggtggctcacgcctgtaatcccagcactttgggaggcagaggcgggcacatcacaaggtcaggagatcgagaccatcctggccaacatagtgaaacctcaactctactaaaaatacaaaaattagctgggtgtggtggcatgtgcctgtaagcccagctactggggaggctgaggcaggagaatcgcttgaactagggagttggagattgcagtgagccgtgatcacgccactgcactccagcctggcgacagagtgagactccatctcaaaaaaaaaaaaaaaaagaaagatagcttttcttcctgaaaatcataaggcatatcttcccagagggccagtgtaatttacatatccattaaatatttgagtggcaccatgtgctgggcactgttctgggaatggaggctcagccatgggcaaggtggacacaatctctgctctcctggagcttcaaagagtgctctggaaggggaggggggccctgcaaaagttctgagcctggaggagtttggcagattccagtagcagagggatggtaagttagtagggactgaggactcagaggtgggctgaagtagacccattagcagccactcataggtgctgggaagaaatttagattttctgctcagtgcgatggaagctgttaaagagtttgagggtgagcagatatgattcacatgtttaaaaggtccttctaagctgttgggaagggaggcaagagaataatctggtagtgaagacacttttgggtgaagataaggcgggaaggaagagatgcaggaggctcagcttggtgagatggtggcctgggctagggtgattacaaaccaagaaagtatctcttttttttttagtagattgcaaattctgcactcatttcaacagcatcactagagtcttcaaagaaacttgaccctcatgatgggccactttgggctgtggctccagcccccaagtcctgccaccttatggtaagggagacgaggtgaagactgacaagcactgttgtgcagaaactattgtgttaggacaagtagatatccctctggaaaaagaaataatgggggtatttctaaactgtatattttattccattaatcagtctctttttataccactaccacattgtttatactagctatggcatgataatatgttttaatatctgctaagactatttgcctcttacagctcttttttttgaaagttttcctggttattcttgcctatttattcatttatttatttattttgagacagagtctcactctgttgcccaggctggtgtgcactggcgcgatctccgcttgctgcaagcgccgccttccgggttcatgccattctccttcctcagccccccgagaagctgggactaccggtgcccgccaccacacccggctaatttttttgtatttttagtagagacagggtttcaccgtgttagccaggatggtctcaatctcctgacctcgtgatcctcccacctcagcctcccaaaacttatttattttatattaaaatgatttaaaaatgtttcagacctacaaaaagtatatgcaacacttcaagaaaggaaagagagatgtgttgtaaacacctatctacctaccacccagattctgaaatatccccaatatactctacaaacgcagaggaagcccccatccacctctcctcagtcactacccccccttccaccaggggtacccactgactttgacgttttgtatttccatgcattttattcatgtttaatgcctgtgcatgtgaacctaagcaaaacagcaatccagatgtttataaattttatataaatggtattatgtgatatatgcttttttctgaatcatgtcccctttcttctccactaaataatatgtttgagagatccatccatgttgagacaagttgctctagtccattactgccaaagctttatggtattttgttgtatggaaatacctcaatttattaattttcctctagatgggcatttcctgttgaaaattgatgtatgcagtttttcacactaacactcttgcatgtacctcctttgtacatttctgagaatttctcttggctgtcttgggcatattgctgggaatggaattgcttgttcatgggatatgtacttgttcagctctcctatatagagccagactgttctttggagtaagtgcacttgtttgtttttgtttgagctttaaaattagcttgactattccctaatgaatgtataaataaataacactttcattgggttaagtttatggattaattcaggaagaaataaaatctttatgatgtttagaattcttaaccaaaaacatggaccttatcttttttcttcttaagtatattttcaagtattttgtctcttttgttgctattataagtggggtttttctctttcaatttatcttgtttgtaatgataaaaaccattgctttctatatatgactttaatagcctgcctttttaccacctaagacagattgccagttaattgtcttggctttgtcacatgtatgatcatattacctactaatgttgaccatgctttcctcctttccaatttatacatctaatatcctaggctaattgtttgcctactgttcccacaacaatgctaaacaatcatagtaaatgtgacattttaatcttgttcttatattttttttaagacagggtcttactgcgtcacccaggcgggagtgcaatgacatgatcttggcctactgcaacttgcacctgcctcctaggctcaagcaatcctcctacctcagtctccagagtagctgagactataggcatgcgccaccatgcccagctaatttttgtattttttgtagagacagggtttcactatgttgcccagtctcgtcttgaactcctgagctcaagtgatccacctgccttggcctcccaaagtgctgggattacaggtgtgagccattgcccctggcctattcctaatttttccaggaaaatttctgatgtttttcattaagcattttgagtttgaagaagatatatttcaccaaaatagaaagtatccatgtactattattttattgtgagttttaaaaaaatcaagaatgggtgttaaatactattagttgcctttttgatgttcattgagacacctggataatattttgaatttattaatatggttaattatataatagattctctattgtcaaaccatccttgccttataataaattttactttgtccttcagtgttttgttagattctccaccaataacttacttaggacatttgcattgatattcataagcaagatggatccaaaggtctgtttgagggttgggaaactgtgtatgaagcatcctggtaggatctgggtgttagagccctccttacagcttcagcatttacagtaggaaccagttttcttctctatagttccgtcacactatgccatgttagataggagggagtttactcagattccttgggaatgaccatagactgcagcctcctactgtagctcatatcattctctctttagccaggcttctgttcttataagtgagttttggagaactgtgatgtaactgtctcagcagatcctctccaaacttttgctactcccatagaagtactttgcagttttaaagcaggttctttttcagagttgaatttataaaggagctacttggatgtgagaatgtacttttccacagaaaggatgttctaagtggtagttgagctgcttcctcaacatggccttggagcctatttattgcttaatgtccttgccaggggtgtgggcatgacaataccagccacagctacccactagttgtcacagttcttgagacaggaacatgggcttagttccatgcttagaccccagaaatccatctttcctgactttggcccggcaaaagggccttcacctccaaaagggcagttgtttctgagggattcccaggctgggatgcatacttgcagcaggggtaccaataacaggttaactctgtcttaagaagaggttcccaactctatttgcgtgagaaaagagaactatgaacatttgcacaggagaaagtaactgcccatcaatcactccctaggtgacccctcaggggaacaaagagcagttggtgtttaaagtcaagtgtttgtaagttaggggtttccagaaaatgggatctctcttggtaggagtcttttctttttctttttcttcctgatggacaaattaggctccatttttatttcttttctgactctagacatctctgtaggtctctattctctggctttccctaggcccttcctttttattctcacttttcccaattggccaccactctgccctcccctccctccctctatcctaactcttggtgtgtaatttgtttgcagtcaggttgtttctttgatttacggggcctcttctcggcagaattataataaatggattgctttgctgagccccagctagttcaacaccatttgctcggactgggtcaagccccttgcaaacagaggatgcatcctgcacagaggcacatgctcacacacacggtatcagccctctgcatctttctctagccaaatataatgaaaaatctcctcatccatctgagaaccaattcagttacaagaatgtaagaagagatatccccagtacggtccacctccctgtaatatggccctgggtgctgatggtcccagggggtgtagacattgttctgaatacagacttaattagttgcataattagcaaatgtaagcctataaaaccttttttgtttgtttgtttgcatctggaatgctcctaaagactgaaaacctaaactatgttaactgaaatgaggaatgaacaaatctgttcacgggtcgctctgcctggaacacttcagtggtttccttttgctctgagaataaagtggaaaaaacaagcaaacaaatcataaatccaaacaaagaacaaccttaatgtggcctgcaaggtccagcctgcctgatctcccacccctctctccagtgcaagcacatactctccctcccacaccccctacactcacatgcccacctcaagagccttgcacttgctcggaagtgagggatcccagggttgcctcaagggctctggacttgcccttgcctctgtctgacaagtcctacccagtaccagcctcctcgccatcatcaggctccttctgctcatccctctagtctcagccttgaggctgattcttctaggaaatattttcatccttatgtcaaaccagggcccccattatctgttccatgcatatgctgtcgtattgtgtcagctaaggcatttgggtaactccttgcaggatacctgcctgtctgtccctccagaccgtaaactgtgtgggagttggggtcctacctattatgttctgaatttcatccacagacctagcagagtgcctcacagagcaggtgcctgtggccaaactgtggacccaactgagcaaatgaaggcaggaatgaatgccaaagacaacagtatctttcttccctaaggagcgctcttaaatttgcttcctctgtttttcatccttattccacacctcttttattccaatgtgcatggcagttcttcctccccacttaccaagctgagcctgtttggcttcttcctaccaaagcagggattctaagctgaaaagagcaccatcccgtcttccaaggatccttgcagcccagcacgtgtggggctcctaatattcctggaactgagttggtgacttcatcttgaggtgccttgggacacagagacacttccctggatgtccccttttcaccacttcggagttcagcatggtgtggcttgtgaaaagaggacttggactggccatgaagctcaggtcacccctctcttgggcctcagttttcttatctaaggctccttgtaatcctatgacttgaactttctggaggaaaaatgcaaaggtgaaagttttacagcctagaaaccttctaagaggttgtttaaaccttgcctcagcctccaggacaggttgcacctcgtgtgcccatttcttctctgaaagcctgtgttctctgtattgtccttctccctgtctaaacactgtttataaagcccagattgttggtttgattttcctgggttctgacaagtgaaagagggctctggaagaacaatggggaggttcagttcagagcaagggctctgatatagcagaccagccagcctcagtacccagactctctgctgtgcgcttttcaacatcactacttagttgggtgtttcatgaatacacctgacatagaaggtaggattttctctgcgtcctcctcgtggtcacctctgatctgcagaaacacattgaagagccaagtgctttgttccgggaaaacatctccttctgttggttttattcccctaactggtgtttttctgtggtttctcttttctcttctttcctgggaatgaagtactgtggctgttatgccagagcctattcttttcttgtttgagttcaacaaatctccagcatctgaaaggagtggctgcctccagccttgggcttctgcattgaaacaggcttttcactctctcatgcacaaccaaatcttctactttaataatcactttcctctcttctggagatttgcagtttaaaagatgtgatttatacaaaattaatgcaaaataggagtctacattaggagaaccccagtgccctctgcttttccctgcttcctttccactgcattgagggccaccttgctctttccagctcagcttggccccagcagttgacacccacagagatccacaccgtcttgatcttgtcttctcattctttatttgctggctcaccagataatctgtgagtgtaacatttttcccagtcacagagagtcaggatccagatggacacaggggtggtcttggtgtcctgtgcagaaggagtgtgtaggagagtgagtggctatccttccaacatcacgcagagagaagatgagctgggagagaatcatctctgttaccaatgcattttttccacaaggaaaataagaaagccacagctttgaagtggaaattttccaggcttggatgaagctaaaaattaaaatatggtgctaggaccttttacgtgcagatacagaatctgaaaacatgcacttttccagttaaaaatgctcaaatatcttcccagcactcatgtaagcaaaagtgaattctgtatttataagctctaagaggaaaagccacccgaatgttaagcagggcagcttaaatttctattcaagtttcaactgctagagaaagtgggctgataacagaagagcgagccaggtttatcttctgcattttgaaaaggatggacagggtgaaggagtttatgcaattcaaatccaaattgaaatgagcatgggtcccttcataaggctgtcctctacttttccctttagttacagcaaaatgtcccaatttctgtagcctttgccaacccatctctggactggcaaacaggcttgaagatgagttaggggctggggagaagcaaggaactagaatatttcctttgactccctctttagttttcttcacacatctgccagcagggaggtgtagccttcctaggatcaatggggagatgaagaaatagaagcattttacaggtacaccaggacacatattgtggcatgttgaggccaggggctaagctctaactaagatgccacctagatcaccgagacctccagctgctcacgggcccataagctccttcgtgccctccctgcagaagtcatctcagacctgttgagctgtatttgacttgagtcttctggctgctgagcttgttctttaccagttttccttggccttggctgccctcttccataatctggtgcactggatgtggattgcctcatcagcacaagggggacaatcacagaacctgtctcataagcttattgaggattaacagaaacactgagaccatgcctggcacacggtgagcacccaataatggttgctcttgttgtcgtgaatattactgttattattcagacagtgattatttccacccccactgatgtgttgttgctgacctttctctttgtggagtgacctgatgatttcctctgccaagggcctgctccttcatcgatggccccactaagcatgctggtctccactgtaaatctcaatggcgctaaccttctccacaccctgctctctgctctgaagccttggctcatcagggataattccctgaggtgccaggttcagggggaagccctgcttgggcagatttgctggaaagcaccacaggtttggtggtgacagaaaccgcaatctgtatgccgactgcggctattgtcgtcaggccctgcccaagagcccttgggtgtccaagcgagtggaggttggcgaagggtgagcctagtggctctgcctcctaatggcgagcaagggagctggatgggggtccctcctggtgagtgtcatgctccttgcgtaatatctgcctgtcaccagggggctgtatggagtgtgggcctgggccacacagggccctgcaatgagatgactgatacttggagggtttttctgaaaagcagagggcagaggtgatccatgattctctgccacaatcagagttaagtcagggaacctggggcccagcccagccctctaccatatttattcctgaagggcagttatcttcttggtcagcacatcatctgtagggttctggaagagtccaaccttattttggcctggggggccttgaatggccacagcatctgtaaggaagggataccccaatcccagatcctttctaatcctctggactcagacctgagtctcctggcaatgtcattcttgggtcaggggtgagggagggtggggaaaggagcaactgctggtgggcaaagaaagggccagtgaaggagcggccctgcagggaccctcagtgcaggccagcaaagcaggggttggttacatcacacgcaggcctcttaaggcgctcctcacatcacaggtgtgttcgatcttctggcaccatcttttcttctgcccaggatattttctccacgggtcttttcagggccacagctcatccacaactcaaggtggcatttcctctgggcagcctcccctgaccacccactttgaagtggccagcccccgtcattcccttgcactgttgattggcatgttgaatggatgatggatgaatggccacttctccctttggggcctttattcctcctcacacaccctccttcatcttggcttgaaaaccctaggattgtctgtgaaagaaagaccgtgcctggttgtggacatcagcccaagtgggctgtgtctgcactccctccatggggagaaacatctttctgctctgacagctggggctgtcagtgctgcgacaaagggtggaggttaaagcccttccatggtagctcttcttcctactgggaggagcccaagctgtatgtggagtgtagcacccccctgtgtttcatcactaaataatccttaggttccatgatgacttggggcctctctgattaatcccaggaaggcaaataaatcaatgttatctcttgggccagctgacatcgattccggagtctgtggggtgggctgtggtgagagggaccttaccctaggtggatgagtgtgcctgggaaggcagttggggggtgactgcacatgggccaagcgttttgtgatcccagcgaatcaacttcatggccagcctcctataagttacacttttatattcatctcatcactccaaatatcattcctataaatggatgtcattaacagtcccattttcagatgaaaaaaaatcacttgatcatgatgacaccaagtgctgctcatggcaggatggggctgagaagctgagtgtgtaggatttccagcccagtctccactgactcctcttcatctaaaggaggagagcctgacctcctttttctgaccctgtcatctaaaatccaagccctatcgaatggcactgattcagcttctctctgtacttggtggcaggccaacccccatgctcccaactccctggagactccagacaagtgacggtagagtctgcacgctagcaggtgatacagggcttcggcacaatctgtagtctggaagcaattttgtgttttctaggcacccatctgtgagaggagagcaatgtctgtacagggtctgtttgcttatggaggaaacaactgctgctcaggagtgggaatgtctgccctgtcacgtgtgtcatttcgttttcaagcagaggagttccagggatcctcaggacatggatccagccttcaggggagctcagctttcaggccttgggaagcaccttgacattttccttccacattggaatgaagtttgtgcagtgctgggtgtgctgtggaccagcctggagctcaggcctaccctggaactctgactctaggcagtcttcagaagacctctgcagcctccacttggagggcagggagtgggggtggagggcactgtcggggaggcatggtctggaggatgtcatgtgtcagttcttgattgtctcccaatagatgaggaaaacatccctacttatcactttctattttcttattttcccagtgtgctggactgtggggtggaggaggagacatggattcatgggcttttcacaccatttgagggttgacagggcaattcccaggagtagttaggaacagaaaagacaccttagacccctgatgcatgaagttcatcatcatcatcatctttaccatccttctcagctgcagggcttcagggattgtggagtgtttttgctagctcttctaggtagggagtgagattggtcctgagattggcctgcgatgttcctttactctcctcattgcacaaagattctacactgggcagcttgttgaccccccaaaacacccagatcttgcatgcttcagtgccttcgccctgctgtttcttctgcctagaatgaccttccatgcttctttgactagcacattcctactcaagcgctaagcctcaactcaagctccctcatttctccttcacttcccaaaaggcagaataaatatctttctaaatatagtgtttatcacatcctaaagttgatatcttccttattttcaaccactcaaaacacactcttagacttgaagcttctgtttttgtttgtttgttttgttttgttttgtttgttttatttggaagagacagggtctcactctgtcaccaggcttgactgcaatggcatgatcatagctcactgcagccttgaactcctgggctcaagccatcctcctgcttcagcctcccaaatatctgggactacaggcacatgctaccatgcctggaggagcttctccaggaaaagggctttccaggtgggggcacagcaagggtataacagagagtcatgactatacctggtgagtttgcaaggtagtagactgatggacccagagatttgttccaggctgggagttgtaggacatggactatggaggtcattgtgtctatggtgattaaaccactgtaggagaatggactttggggctagataagactctggttagaagcgggctctggttgcagtatatactgaggctttggattcttgagccttggtttctccttctatagaaatgtgacaatagggcctgtctcataggctgctggggagtcatggcaggcaaaggccacagttgtgctcagacatgatgactgtcatggagattgttctggctgagaagccatggcccttggaagcaggaatcttaccttttacatctttaggtctcctagtggtcccagcaaagtgcctgtgcttgctggctgctcattttttatttttattttttttgtagtagtaatagctgaatagagataacctaaaaaggatttggaaccaggaataaatagaataaaatggtagtcaaggaataagactggtggtgtgtgggtagggcagcttagagggtgggtggagaggtagaatcttggtcctgagaaatcaggatattttaagtacacatctaaaataacatggacttcaggcctccaggatgtcatgactcctcttcctcctgccctcctgcctgggttaacggggcccagtgaggaggtagacctggcagagagatgggaaaaagcatgtgaggacataagagcaagtgtgtgtggtgtgcatttgtgtgtggccatgggtgtatgtaggtgtgaggaggacctgggtgcatgtgtgtgtgtgagcacaggtgtatgtaggtgtgagggggcatgggtgtgtacatggtgtgcatttgtgtgttggtacaggtggatgtagttgtgagaggcacatgggtgtgtgttggagggtgttgtgtgcatacattgtgttggaaggtctcaatggaccaacagacacatttatgtcctcacatagcatacagttgcatggggaagaatgatgttaatgaaattgttagttgcaaatgtggtgactggtctgatgaaaaattaggggactctaagaattcatacagtacctaatttaattcacacttggggcttgggatgtggaacttctttttaaaaaaaaaactttttaaatcttattataattttattgagcatagtttaaatatttttacattaatatgtacatattttctttctttaacataaccacaatattattatcacatctaaaataattaacactaattctttagtgttatcaaatacccagtcagtgtttagattttcctgtgtgtctcataaaagttttacagttggtttatttaaatcaggatctaaacaaaatctacacgtaacacttggttgatttgtctcttaaaagactccttaggctccttcgcccttcttattttttcttatttttcatttaatttatttgttggataaaccaggctacatgtcctatagcatttcccagggtctgggttttgctgattgtatccccatggtgttgtttcctggttccttggttccctggacatcctgcaaactgagagttacacctggaggcttgggcaggtttgggcccagtttggtttccccacaggcttctcacctgctggcttggcagccactggtggcccatatgggaaaggcatctcactgagtgcagcctctaagctacagccagcagggcaagaagagtcatccaggggaaaggaatggtggcgttcaaggcaaaggaagccatgggtgcagcttgggcatgagagaggatgggggtggaactgagggcaattctggggagctgtgtgggtggccagggagaactgcaggaggcagagacagagcaaagctgtagaaatgtggactactccctcagcctctgtatcttcatctgtcaagtgaacgcagtacctgtaactacctcttaaaggggttgtggatgttaaaagagtggatgtgacatattcagcaccagtgactggccaataggaaaggagcaatacttgttatttgtgatgctgatgacagtgacaatgtggaggaggagggaaagggagcttgtacttttctctgagatccatgggcagctattgaaagcttttgcataagggacagatataatcaaatttgcatttatagaagtccgacctgtctgtgagatgaagagtgaatttgggaggtgcaagaaagggggcgagacagtagttaggggctgatgcaggtgcctaggagagagggggctgtggctgtatgggagcaatgtcagtggatatagagatagatggaattattgggagatattcagagaggaaggacagagaagaagtgatagaaaagtggatgagagaggggagccaggagtccaggagggtgtacaagtttttggcttgagtcactggcaggaggaaggtgccacccagtgagatgggaagtggtctccaaaactccaggatcccagaccaagcatcagtcccaagacttttatatttatgtatatagtgaatgtgtgcatgtgctactgtgctaatgcattttgtgcattttaatatatgcaataaaaggaaattatttaaaaatcagataaagatgaaataaacaatattttaacagatcttgctatgattaaaatggcttcttcatctcattagctggtacagcaggcagaataaacactcagggtaaggttcatcattaatgatagtggaagtataactgtatttcatatagccttcttgattatttgatatttttgccaatttcttgtcatatctgattagattatcctagtttttagctcttcgtgtggctgatgaagagctattactgggagtagggtgagtgtcagcagcctcaggctcttgggctttatttatgctttaaggtatcagagtggttcgacttgagtatcttttgcagcaattttgaaagccacttattccatctctataacggttagtttagtctaaaccagataatgtggcctggaaatgctcttcaccaggcatctgtaaattgccatattccatgcagataatgaacatggagttagggcaccctggccacccttccgcaggttgcccttgcaggcttttcaggacacatggtcctgactatggcccaagttgagggtactaggtcccatttgtatattcggtattactaaaacttatgtttctctcatcttatttgatgtattaaaaataaatagaaataaaagtgcgggcactccacttggagctctgggtggctccgtgccaagctggggacaacaaagagcttatctggaggtcgttggaaggagcagggctctgagagcctgctcagggctccagtctgggctcctgcattccaggcatcccctgaagctttagggtagctcctactggtgctggcaaaacaagggtgagtgtatggaatgagagaggctgactcttcacatccaacctctctggcctcttcagcagtgtgcccaggagagaagcctcagcttgcctcaaggcctaggatgtgctgacgtgcacagtgagcaccggcacttttagcagcatcatttgtcattaaaatgaatttgcttgggatcgctgctgccctttctgagaatctccttctcagaaggtccttggggctggaagtttggggtcctttcactgtccactcatgtatacttcccttccacccagcctggactgtgtacgcctggaccaggttttattctagggatgggaatgatggggccttggtaaatggagggaccaaaggtaagaattctatcaaaggtaagaattaggtaatagattaaccagacagagttggaaggaaagatttgtgaagttattaaaaattgcttggtgttctaaagctggttattattccattgttgctaattctgggtcccagtgaatccacaggagagaagtttcactgtgaccccaccgcagccagatgtgcccacgaaggaaaaagcctgaaggcatttcaggccctaattggttgtttctgtaatgtttttcattgattgtgcagcggcagtgcaagcagctgcccagggagcagagcaggcaagcaccgggggccttttcaggagggtgtgtctacctgtcatgaggctgtctgctgctggcctaggagatctccaagcccttttggatcccccagccctggaaaggaggctggctccaggtgggagaagaggtagcactcttgcccaattaggagcctgtagctcccaggctttcctcctctgagtgaacatttctttctgaggctggattctgccctctgattatcgcaacacatcgcctgtttgctttttcttggtttaactcccacactaattttgtgcatgaatgagtacagtgaaaccagtttaatttgctgttaattctctgttcaaaatattctcttctgtttaagggacatagtcgctttcatctctgaggcagcgtgtgaaagcaggcagctgctagggtggtggaggggtgcctgcgagtgggtgtcagcctgggccagtgtgtctgtggtctgtggtctgtggtggggggtggcaggtaagcaccatgggggtggacatttctcagaagcaacaacccacagtttttggggctttacacttgctgagccagcggatggtttgactctgcatgggaaaaagttcatagctgggagaaatacctcctcaccaaggggctatggctgagagattttggcacacacactgagtagctagtctcttggagatcacgagtatgggatggggaagtgaattctacagctgatcacagatagtcagggaagacatctgactgtcatttaggaaacacaaactttaaacattccttcaaagtgtctaaatatagtgtttatacaatttgttcaagcttagttggtgaaagagatctgtttttgacaaaatgttcttgtttgggtctgctatgcctagctcttttacttctctgctttaaccaggggccttttaggggagcgggctttgcaccaggtggcagagtgcccagtcacaggactgcacttggagagacaaatgatctctacaggagctgaaactgtaaaacaaaagtaatggggcatgattccacagcactggtcaccatgagtcagcccctgagaccatgtgggagtggttgtggctgtgggtgagggtcctgcttcactccccaatagctgcatcagtacccacctccagtgcagtgtttctttagaatactcttgtaagttgcaggtagagaagattggatggacactggggatcagccttcctccactttcctctttggagctatccaaagtgctggctgagggggccccaggagcctctctctgaagccgacatattttctctgtgagtttccacatgctgctggcctaccaaactgattgtggagtgtgcgcactgcagccactccccgccacaccttccacacatttctcttgtcactttccgcatgtcaggcatttctcttgtcattcccggcattactgactgcccagcattgccaaccagggggcagggcaagcattctgctttgggaagcacatgtggtttatccatcagcccagcacatctgtagggaccacccgctgggaaaaggtgcaatggagtggaagcctaaggaaaagaggaagagcaaaggcagcaggtggtgaggtggttttacaagggccagtcagtgtggcctgtggagtacaccacacttctggcctcctcttttcctgtgctgaggtctggccaaatctggactgactcttggcttatgtttcctcttggtgctgaccaggagccttgctgtggacatttcctcccaactgccctctaagctgtgaaagccagacagagccttgccgtttccccatgattcccaggcagtccttggactgtttcgattgagcatcttgctgttggcttcccttctgaagccccctttgcccatctgctagcttcactcctctgccacctgattttgcagtattgaattttctcttggctgatctcctttctcatacctctgattggtggtttccataagatcagaggagactcttccgagagcccagggcccatggcccttctgagcgctcccatggtgatgcgatcccattgatgtgccaagtctacagaaacccagctgacaaacacactaattatacacgttcctctgcaaattcattaatggcaaatgaggcctgtgttccccatgtttattctgtttccctttatacccctttggaaggactcaaattcctttttgaattttgttgaaaccatttagcccgaggggatagcatcatagatcagaattaggccagtcatcttctgtaggtacactctatttagatgacttagtaatataaattttatttaattttatttttgttcattgagtatcctctgggttccagctggtgattttctggtattctagaggtcacacaaacttttgtggacgtttataggtatgctgatagctgtaagagttttttcttttaattgtacaataaaataatgaatgaagtgatcaaacgtgaaaagacaagttttaaatatcactgatcaaattcttctagcatgtttgtccaggccacaacccttcactatctagtggtgggaaaattatatatcatgggccaaatccagcctatagtttgcttacatgaggtaatggcaatggcagaattgagtagttgcaacagagatcttatggctcccaaagcctaacatatgaagtttgccagccgccagagcagaccatcataacacttatcagagcagccagtgtggtcagtggtaaaccaaggccctcttggagaatgtgctcctgggttgggctggaggactttacctagacctgtgctgctttgcagcccagaggctatcaccccagaggtctagggagttgagccaccattcaactgatggtgttgtgttcagtttgtgtaatgagatctcaaacagtagggccaatgcttgtctcttaatggtcttctaagataagataatgcctgtgaaaatagtttataaactctaatggctagacaagtgctatttataaaaggcatatatctgaatccaactgtttagaaataataataattagcattgataagtgattattatgggccaggtgcagtgttaaacacttcacaaaaagtacctcattcgatcttcaaattaacgtgggaaacaggtatattgcatccatgctactgataagaaatctggggctcagagaggttgtgtgggttacccagtgccacattgccattatcaacacagcttagattggaacctttatcttttgacttcaactccagtgctctcttagttgcaccatggctggctaggtaagagtccactaaataaagtagatatgtgttttcttctgctggtagacaaagctttgcatcatttttctaaaggaagggcagatgggcccaaagtgcttggtgaaacataaagaaaacacagctcagttgtctctggccattaccagatttaacactgagatttgaatgctgtagagtgaagttccgtgtcattttgctgagatgcaaatttgacccacaggcactaaggtaccagccaagagggatgcaagtgctttgctgattgccagttatcatcattgcattacatacattagattaactgcctcccgtgaagtggaagaaaagtgactgacccccctgcccgccccctccccaccaagaaagccagccagcactggtgatggaaatcttaaagaaaaagagaatagacatcttataagaaagagtagaacttggctgtattactcaatttaaaaattcagtaaagtcttgggccatgcccacagtagatgtcattgactgattgcatttcggaagtgagggataattgtctatgtcagtgtttgccccacatgttctcccctctccagcctgctagaatgtggcctcccctctccgggcctccaacatgctcctgctcttaaatccagagtcctcctggtgcagggttagagactagaaatttccaagcttcctcctttgaggtgctgcacaccacagctggtagccaggctagggtctcatttccatcttcttccctcactgattcagtcactcatgggcttgtgctttgtgtccagcccttgcctgggaatagttcctgcccttacaaagcccacactgcagtgcagtaagctgtgtatcttatcttcctttttgcaaaccctcttctctcagaccccaaacacatggtgtggggccttctgcgtatgcatctagaggcttcagtgtgtcggcatggaggtgctaacattcccaacaaacatgagggctggggccatgccaagcctctgtgactctgcagctcagtgaattctgagtgatagaggggctggccctctccataggctgtcttgggcccagggcccagacctccagccatgcttccagaggccctgtgcccccatattatcctacccaggcagcctgcagggaaggggatttgttccctatgcctgtcactctgcgctgtgtggagggcaatagggcttttgtgagttcccaagtgaacccactggcccattgtctggcccaactctccacagagctccaccagcgtggtgaggacaggggcagggctgggaaaggcctgatatattcctggccagagctgcaaacactgttcatcccagaagcaccctgttaagcagcaacaacagcacaaagagggaggagaaaggagagagtgggaaacaaggagggagaaggcgtgaggagggagaaggaaagagaggtgaggagggggaggaggaggaaggtgagggcaatgaggaagggcacctacagcatggaagaggagcttcttgtcagagtccttcaggtcctgcacatggattctgcagagccacatttctcctggagagactgtaggatgctcagtggaattcataagggaacagatagagagatgaagtgagcctgatggtgccatggggctcctcagacagttgttgtggtcctggaatccatcaacagaggtaggatgtgcccaccaagaaggtgataacccactttttcgctgggctgatcagaccccgtggagcatatagagctcagcaatgggtgctggcccatcagagaacagtacacacaaggtgggggcggggggcgggctggaagaaaagctgatggacccaagagtgtggtggctaggaaacagaatgctcaggaggtcctggcctctcataatctgaagggatgccatggagaaaggggagtagttgattctgtggggggcctttcaggaacacaacaaggaccaaggaaagggaatcccaaggagccagccttctgaaagttggaaccagctaacaagaaaatgtctctctgggaaagtagtaagtgcctcatctttggaggtgagcaagcggagactgcgtgaccacctgggtagggtgctgtggccaaggctcaagcttggggtggaggagcacaccatgcctccgaagcttttcaagccttgagaggttctgaaatgcgagccaggcccagacttagggcccatcttccactgcatttggatagcaggcagtgctatgaatgagcagatgaaatctggatcccatcatgtccaagctgaaagacacagaacaaacctccagatcctgaagctactcaccttggtcttttctcagttcagaaggaagagaaccactggtgtcatttttcctgaagtctgctcttttggcctcaggaaaaggatagggagtcttgaggccacagcccctcaagaaaaccttcacccctacctccacagggagaattcaaagccaagtggacaaatgactctttccttgagcttccagcattacaagaggaagaggtgacttccagattgcccccaactgcccagtgttaggagaccaggatcagcacttcaatttccactcaggtacaagcctcagacttcagtccaaaaggacctagagtgatcagccaaccccaggaagatcgagcagagagaggtccagccccacacagtgtggttggctgcctcctagtccattccctccaacaaactaatatgtagggcctctcttcagtctcagtttagctgctaagggaatgattccataaaatgtttgcagtgtagctaagagtgccatccttaggcctggggcatctgggttgtgatgtggaagttatctagtccctaaggctgcaagtagctttttgagtgtgactgctctggccctgggaggtttgaggcccaggacccctccttgccctcccttcctcctacagtgggtagaccaaatgctcacagcagagtaggagggcaggagggactctaaggtcatcatgcctgtttgccccccactgtggaaaaccaggacacctcgaaggccagcatgggagctctacctggatcgtcaaattcctccaaagacatttatgcacagaggcattcactgcaagagctctgtgaggctggtgaggaggatatttatggcattgtgaatatttgggatctcaggacatgctggatgccaggagccagtcaatgctattgattgggaaacacaaatagaagttttaccagagtactctccagatatcttggtgataacagaggacatagcagcatgagtgacaggcagggctggacatgcattccctgacaagaaggggtagaatggcaaaaggttcattcctgcagttgggagcatctgtggagtcagaggggtagcactggaggggccttgggcatcttgccattgacccctggcaactgcatagctagaggaggtcagaactatgatctcacagacaagagtgtgccgtactctcattaggcttctctcatgggtcggcccttggtggtccattgattccagcaccaccctccccttgacctcctgtgcagttgacagtggtcatgtggtacaacaggacagggtgagaactgggacagaaaagctattgtaagcacttcacaatcaatcctgtggaacagggagagatggataaaaagtggagtgattgagacctgctctgaatggtgagactatgcagagttcaggaatgggacagactcagtggcttaagttatcggggaggccacctggaggaaaagggaccagacttccaccttgcatcctgcagcctttgaactcctgggcctgaatcatgcagcaggaaaggctcattggccatcagtggatgcagtggacagggcatctctgagtgcaaggtactctgcaaggtgtggcagcccatgggtgagagtgaagatcctggcactattctctcagagcctgcagggaaatggagcaggaaaccacagaaaaggcagcacagaatgcaagccatgaaaagttgggctagggctgtttgtgcaaggtgggctacatcttccggggaggagggccaaggctgggcagttaggcaaacttcccagaggggccgagagggatgatggtgaggttttagagggctggagggatttggtggggtggagtcagggtatgatgtggtcagcttcagtcagggaagactcctgggtagaagtctgggggctgcagtaggccagcctggctctctgaagaggggtggctgaggtcttgaactggagaggtggcagtgaagtaggccatgaagactgtatgtgaggggagtggtacccatggggcagcagcctctgcatggcaacactaagaatggcgaatacttggaagaggatggcagcagctggtgtcagcctcctggagggtagctgcatggtgatgcagcctttggagcctcagcagcaccagtctggtctgggatgtgtccaggagaacttgagagccttctgggcctgcccccactctttccttccctgactggttgcccctcactggcacgtccccaagccccccacagccatcccacccagggatcctggctctccggagctgctgccagtgcatgcaggggtcctaagggcacagctcagtgcctgtgccatctgagaattactgtgccacagatcaatcaggactgagggcccaggagggcctggcagggagaggcagatggcagcgtattccttctgattaacgagcctgggccaccatccatcgccggccttcattagggctgcagagagtcattttgcatgggcgtgcaggctctcctccccgctcttctccagggtgattgatgccccctgggtgcttgcatcctcatgaagtgagaggccttctctcatcttgcccacaaagagcaggaggcagcaggtttattatgcatggttcttactcatgtgccattggcgcaaactcattggtctgtcagagtggctggggcaaacagatttaatctcccttagaattcatggtgctggaagactggaacatgccaggctcctaaattttcataggtctttgactctcaccacaaaaatgcaaataggtgtagcactgagtagcagtgggcttctggccaggcctgcaccatcagcatgctgggacattgatttaaaggctgtttctggaccccggcatgcctgtgtggttctttcctttcctggcctctgcctctctctctctctttgctgctggattggcagaagggtatgctctgtgtcaggaaggaatctgagtcaggagaaggtgagccttggatagaagcctgcctacaggtctgattaaatgccccctgaggcctgatggcctgggagtgggtggggctgcccagcaccatgcctgggccagagggcagcctctgaggcctgcctttctgtgcccactgacatggtctggccagtttggctcctgcctacagatgtttgatgctggagaggtcttggggtccccagccatggtggtaagacccagttttcttcttggttatctggctatggcatatttgcagacataggaaagggcacatgtgggcatgaaagggtatctggccatcttttaggatttgggggaatctgatatttcccggtatcagaatggaaaaaggagctgagatagaaggaaaataaggcaaaggactgtggctatttgggactttggtatcccaaatgaaaggctttttggttttccattttccttgttcctgtgtttgtctcactggctcaggacttcatctttattggagagcagcgtcagtccttgcatccatagtcgcccccgtccatcagtgaaccatatggaaatggaagttgtgctaagagtggggaggccaaagcgagggaggcccagaacaccctcagtggtggggagcacacagaggtagtggaggctgcaggggcatgggaggggtgaggggggagctcagagtcctgggtgccagcctttcatgagaacagtctcctgagagcaggcccagcgctgaactttcatctaacatcaggcaagaataccatcaaaatcattttactgtaaagagaaaacctgccaggtccgacacatcagggagatgagcagcatgttatctgggaggttgctgctgcccctgttctgaagcaccatccctgactttgggaaaactcagagggataatacagcggctttctcacccccttcccaagtgctgtggatgcgaggaaagactatagtcttaagtttttgattgcttcccaagaggaaacactctatggccggggcccctaacccccaagccatcaaccagtaccagggctggagagcccacttccatcaaggggtcgagggcagggtgcgaggagggcaatgctgggagcactgggtttggaatgtggccctgttcatccagagcagagtcagtggctagagccccttcaacaccagtctcctgtgctctgcatgtgtgccaggcatggagagaaaggctcttcaaaaacgcccagtgcagttccacgtctcagtgtatattggtggtggtcggtggtgctgtaactatttgggctccttggtgacctacattgctttagacccagttggggccacacaggatggcctctagctagagagaagtccatcccagatgccctcatgcatggtgtatgtggggaggtggaggctgtaccgagagcccacatctgtggttgtgcaggagttggctgtggagaatgtgactggatggctaagttgggtttctcaatgaactgaagctgaaggctgggtttggagccaggctttcagggcccagtggaaccaaggtccacccttcaaagtgaacagtaggattggagactcagtggccagcccagtctcaaaggatgtaggtaagagacttgggtttgtgagaggttctactccccacatcaggacaaaacgtggaaacataacaatgactgctctttgcagaccaactaccacttgtcagaggctgcaataggtgcttggtaaataatattttactgacttcccacaaatgccttgtgaagtgaacattattaccctcatttagtggatggctgaacatgagccttagacgtctgagtaatttgctgaaggtctcacaaccagacagcaataaagctgaaactcacacccaaggctatcagatccaagtccagtgtgttcaggacttggccacactggcatgtagctgcctccttgtgtgggggactacaggactctggggggagggttgttggagacatgggggctgccttccatgggctactaatttaagccctgagcatcatcaggggtctggcagaaacagatggcacagtagaaagaggtgattgaggggagattaatgaagttctgtttacaaaggttcacagagttaaagacaggcaacaagaatgacaaagcactcagggactagcagcagcagggggcttttaccacccttaggtttgaaggacatggggagggagccatcttcccagaactaggcaagggctgcagctataggaggggccaccagcctctcccagtcagcaggcaggagcatctcactccccatgtcctataggctcctgctggtgaaggggcccagtggatgcctctctctgcccaggacagggaagagaagggtagagagtggaccttgaggagcaaatagaaaccatgactcacctgctagaatgggtatctttggaggaagcacctggccttccttgtgtctgtgtcccccaagctcccagcacaggccctagtatttgctggaggaaatccaacagccccatttcccagtgtcctaaccctcttgtaattggttgaattctgtccctcacaaaaaagatatgttgaggtcctgaccctcagtacctcacaatgcagccttatttggaaacagggttaatgcagatgtaaacagttaagaagaagtcatactagagtatgacggacccctcatccaatatgactggcatccttataaaatagtcatgccacataaaggcagagacagacagggagagcagcatgtgacgaggtaggcagattggagttggcagctgcaagccaaggaacaccagagatcccaggcaaaccaccagaagcaagaaatgcccaggaaagatcctccccgataggttcagaggaagtatggccctgatactgtgtctggaattggtgggttcttggtctcactgacttcaagaatgaagccacggacccttgtggtgagtgttacagttcttaaaggcggcgtgtctggactttgttccttctgatgttcagatgtgttcagagtttcttacttctggtgggttcgtggtctcgctggctcaggagtgaagctgcagaccttcgcagtgagggttacaactcttaaggcggcgcgtccggagttgttctttactcctggtgggttcgtggtctcaatggcttcatgagtgaagctgcagaccttcgcggtgagtgttacatctcataaaggcgttgtggacccaaagagtgagcagcagcaagatttattgcaaagagcgaaagagcaaagcttccacagggtgggaggggacccgaatgggttgccactgctggctggggcagcctacttttattctcttatctggccccacccacatcctgctgactggtccattttaccgagagcagattggtctgttttacagagagctgattggtccgttttgacagggtgctgattggtgcgtttacaatccctgagctagacacaaacgttctccaagtccccactagattagctagatacagagtgctgattggtgtatttacaaaccctgagccagacacagggtgctgattggtgtgtttacaaaccttgagctagatacagagtgctgattggtgtatttacaatcccttagctagacataaaggttctccaagtccccactagactcaggagcccagctggcttcacccagtggatcccacacgagggccacaggtggagctgcctgccagtcccgcgctgtgtgcctgcactcctcagcccttgggcggtcgatgggaccggacaccgtggagcagggggcggtgctcgtccgggaggctcaggccgtgcaggagcccatggcagggtggggtggggaggcttaggcatggcgggctgcaggtcccgagccttgccccgtgcagaggcagctaaggcctggcgagaatcgagtgcagctccagtgggctggcacttctgggggacctggcacaccctccgcagctgctggcccgggtgctaagcccctcactgcccggggctggcgcggccagccggcagctctgagtgtggggcccgctgagcccacgcccacccggaactggcgctggcccacaagagctgcacacagcccctgttcccacccgtgcctctccctccacacctcccggcaagccaagggatccggctccggcctcggccagcccagagaagggctcccaaggtgcagcggcaggctgaagggctcctcaagcgcggccagaatgggtgctgaggccgaggaggtaccaagagcgagcaagggctgcgagggctgccagcacactgtcacctctcaataccatcttgatttgagatttttaaccttctgaacacctctgttgttttaagccactgaggttgtggtgctgttacagcagtcctaagaaactaatacagcttctaaagtaagttccatattttattagtgaaaagcactcacatagtacaagcatacacactactaagccactgtaagaccatgccagacctgaggattccagagacagaaagtccatcgtaggtctagaggtcccctatagtttcttgtcatgtttctcagataccaccctaagaactaagagccagaagaaaccctctgaaccatagaggagaacgaccatcaaaagccatgtaccaagggccaagctgggctgggcaggtagggtagcccttctgaagctgattcccagccttacacagctccgtacattgaaaagaccttcccatgtccccatgctctggtctgcttctctggaagtctaccttggaagagccctggagggagagaaatggctctgggccttcccactttttcatgggctatgccacgtgtgaaccaagacctaatctagggcctgtcccaactccttcagacatctttctatgctgtgacccatctaagctgcgtcttctttctagttaccgtaattaattgcaccttggaacacaaaagaaacagaaggaggaggatgtagtggggaggactgtgctgatctgtatgtcctttaaaagagcaaatttcacagtttgttttataatttaaatgcctgttcagactcattcaatcagtcagtcattcagcagatgggttgggttggcactttcagtttcctcaggcttgtttcttctcttcctcactggccatgaccacacatcaaccagtggagacttacacaataagagcttccatttgcctagcattttatactggcaaagacaataaataaatgtgagtcaaatgagtgttcttaagaaaacacagagcatctttatgggcatgtctctgttgactcagggcaggaagcaagagggaaagcctctacctttgttgtacattagtgttttggcattcagcctgagttgatttgctcatcagttgtggagctggggtttgaacccagatcttcagggtttattgaacatttatattgtatgagggcatctgaccaagctctgtgggacagaagtcacagctctgtgctctgaagttacttcgaataaactcagatatataaagtgataacgaaaaccaaccattcaaacagtacgagttctgtagaggaaggaagacctccatgagtaggactaggtcgagtctttcaggtgtgtagaggggaggaggaagacagtccaggcaagaggaacagcatgagcagaaatggggtgctggaagaagggcttcatttagggaactgaagatcaatttggaagaggtgggtttagatcagaaagctcttaaaggccaggcatttgtggcatatcttggagttagtggagagactttgaaaatcataaagtagaggaatgagaagtgatgaaagagtaattttctgaaaattagttacatttttatttctgaatttgtgtcatgtaaagcagcatagtaataattaggaagcccatctgtaaaccaacatcccctacccagcagctgttccatcttgcttcctagtttttgtaggtagttgctgtttcactcagttgaaacactgtctcctgagttgcatctgttggctcacacagttctgcttcctgctttctctttcactgctcacattctgctcactgctacattgtcttcataacactccaggcgtgtgaatgtgctatcctgcacctcttctgggctggttccagtttttctcatagttcagataatgatgcaatgaataccttcatgatatagggctttttgtttacttctgaaattattttctttggacaaattcttcggagtgaagttattaggtggtcagagggcctgagactctataagcctttctttagtgtggccatattactctttaaaaagctgaactatttacattatcagacaatgaagtctccagctgcatgaagagcaaccgagatgaggcctcctggatgaaacaccagttacgaggtggttgctgtggtcctcatgtgcaggaatgaagccctggagtcagatagggtgctgataatgaaaaggaatacgcatctgaaaaagatgctgtaaaggaagaaagaaccattggaatatggttaatgattgagtaaaagactgaagtagaggaaggaatcaaaactaaatgctgctgaagtttcacagctgggccccagggaagtttggaagggtttggtgtgaagaagaagagaattgctggagggagaagatttagatgggggagacacatgggagatgggttgtggaaagtttgcttggaacatgttctctttgaacttctgtggctgtgctgggcccaggcactggtcatgatagaacacaggctggtgcccttaacagtttacagtcaaccaatcccattccaaaatccaaagccagcaggcaacctgaggccaattcagacgggtagggatgagattacagggagaccagcctgtacaggcagcaggaggtccggacatggtgtgaagttggcgcttaaacacctttagtgctgggctcctgttgcaagggctgagggtcaagggcagtagacaccctgaggagccatgtgggcatcatacaggagttccatgccaatagggctggcctgcccagccagcagagcatgtgcagatcaggttcggaggacagctcagagacccctagggaaggcagacgacccagccacgcacacccttggcacctaatgcagtctggatttgggactggggggtattatttaatatatcccactcttgccagtatggactgtcttagggcaggggtgtgtgtgtgtgtgtgtgtgtgtatgcatgcgcctgtgtgtgtgctcatacacaaatatgtgaaggggacgggggtggtctctgcgctttcaacagccaggggctggggaaaagaaggaggaagttccagctgcctaccaggctccatacatctgccattttattccatgctcacattgtacctatgagtccatctcctaccattcactgaggctgccattgcagatctagttgcatggttattggaaaaatttctgtgttctgtgtggctgcaagctccctgagggctgggatgtctgtctattccctgttcgtctctgcttgcacagcactcccttcccccagtctccatgggagttactaaaaattctttgttgaatgcatacctgaacccctttttaccaccttgcagctctcttgcaaggatcctctgcggaggtagagggaaggagttggggctgccgtgtgtcctttgtgcagtgggaccaactctcggctgcttgcatttacgtaatagcagctttgttcttgagctatttcatagtgtggctttcaggcttaaagagttctgtgggctgtggagaataacacagggaaatgactgtacggtggcgctagccctgtcctgcttgaaaggtctgtggacttgccttatcaaatacacataaggcactgctcagaaaaggcctggaagctgctattccatctgttagtatatgttgtattttgttaccatgatggaaggacactgtaaatatttcaactgaatatctgattaatgtctctccaaaaagcatggaggagctgtaaaaagagggtttatttccttttcaacatgatgggtgtctaatttttcccaaatgtcagtatatccaaaggtgccaatccagacagaaacagaaactgcctgcagggccaggcagtacctgcctcttcttcctcacaggaggctcagacctggccccaccatccggacccccaggaggtggccccactggttggtgggaatgccctgagggtttccatactgaagcctctacagggaagtgttccctgggaatatgggatctctctgtcaggttttttttttgagacggggtcttgttatgttgctcaggttggtctcaaactctgggttcaagagatgtcccacctcagtctcccctgagtagctgggattacaggtgcacgccacagtacctggctctatgctaggtttcttatgcatctcatccttcccaggttcctgcaagtcaagccagcccttgccagaaatcccttctatctgccttcttagcctcccttctccttttgctcactgtttttcttactctcccatctgcttgggatgactcctacttcattcccatcagctggttcttgcccctcccactgttgcttttaggagtcactctcccgtctctgtcccaagaggcagggggagatactccattcttccctcctcaccactgcccacccctttccaggaaacctcaagcatttccctttgcctacacacagggcgaatctccctgatgctccttgttgggacaggcacacctgttccccgcatacagaaaaatttttccagttcgtttttccagtctttttctcataggctcagccagaatagggtgccagttatgactttgcttcttgtcctttcctcaactaaaccatgaatttctctgaggcacacatcaatttatatgcattgttgtatccccaacatgtgttattcccttggtctttacaacaatgcaaagaagaaagcagatgaaatatcattagatgtgtaacataattagattcttaaagatactttatcgatatcatatagaatataccatatcagattttgacatagctaaagagactaaaacttggagtgatttaagttatagtaatagcaatacctcatgtttcacagtgttttatttcactcagcctcaccttctcccctcataatcctgcctactagttagctctaggcccatcctgcagatgaggagcacaggtggagagagagatggagagagacagagggagggcagagggacgggggaggttgtatgacacgagcaaggtcatatctcttctaggtagtgaagatgggacttgggacctggtctgcccacaccagcactctctccaccatgcgtgtgcccttcccggcgatctccccttgggcactgagtacgtgctcccagagggtggtgggcatgggtcccagagtcgtgtcctctgcaggaatccccagatctcacagcaccacacgcacttccagctgggttggtccccgtgccactgtctgagagcagaagtgatggtaaatatttaattgtgcttccaccataactttctgccagaactctcaatatgctttataaatgcaaatgagtgcgctcttcctctccagggagatgtaaacctgctcaaatcacttttattcagcccccactagagtgtaatgccatcatcaggagctctctgtgccagaaaagaaactgcccttcatcatatggagtggatggtttatggttttgtggtcttctgtctccacaatgggcagatgtaaagaaatggatttctcttgctgcaaattctgtccaacagagtgtgtggaaaacattatttagaagcagatttaattacagcactagagcaggtgatcatgactaatatgaagtcttgggctgtatttatggggttaataaaacaaatgagtccttggacgacaaagaagtaaggttgattcttttatttgattctggactctgttttcctcgccaccatcctctgcccgctccctgctcctccaacatgatcttgctgttggggtgggggatgcattattctgggagcttttgtggcttcttggctttatgagtgaggatcccactcctgccagaccccagagcttcagcagagcccctcaaaagcccaagtcggccttgtggtccatgtgctgagatttgaggctgttggtgtcagggtgggaaactgtgtgacttgagagaaagcactgcaccttcctgtaccccgattcccaactccgccacaaggattcagttgcccctgtttcaggcccacctggcggagacattttaataatcatggagatgagtttctacagagcctcatggagtgtcttctgagaagtgtattatgtaaatttggtgtgtcatgatgatcattattagtgctgtgaagtggagatggggggagggagggagagctgctctaagcagggaccagcctccccagctgtcagaagaattggagacgaaaacaaacttaagaagcctgctccaatgcttatgttccttcaaatatgcatggggcacgactcaatccgaacacaaactcacatgggtaggaaaatgcagctttctttatttgcttttactcctgttcattcccagtttgagcccctgtttcgctggggtagcagaagtgctatctgggttacaggtaggcccatcatgttaagctgtggaggaaggcactccctggctctgttggctcctgtccacacaggcacctgctgagataccctgtaccccacctgaaccctgcttatatcccatgcaggtcaccactgggtgctcccaggtccccctcattagacccactcaggccctttggcccccctgcggttcctgagtgccatgttagtctggtggggccattggccactccctcacctccctaggatgctgaatatccaagcccctgtgtcctggacaggctctcagcatttctcttgtggagtgggtagctctttgggattgagtgagcaatgagagcataggaagaccctttcttccacatagctccccatttatcacttctgttttaattcccttagtcctgctcctaggatgggtttctccccaaacctttggtttatgacagggttcttctatttcatagtgggcccaagattttgtgactctgcattcacatctcctccctgacatggtaaacaaggagtggctgttctcatggttatgggaaggggaggcagtgggaaggacaaggggagaaaaaaacccaaacaatgcatcatttatattgtacccttccctgtttgttgagtagctatgcagctgggagatgctgtgtctgttcccttgatacatatcctgggaatgcaggggactaggacaccatcacctgcccatatagcaccattgtgtaaatttttaaaagtgtccctctgcaacaattggatatccacatcaagaaaaaagcacattgatccaataccttccaccttatgcagaaattaacttgaaccatagacctaggtaggagaaaaaaatctttgtgaccttgggttaggcaaagatttttcagacacagcactaaactgtaaaagaaaaccaaataataaattggacttcatcaaaattaaaaacttctgatttttgaaagacactgttatgaaaatgaaaacataagacacagactgggagaaaatatttgcaaagcatatatctgaaaaaggagttgtattcagaatatataaagacctctcaaactcaataataagaaaataatccatttaaaaaggagaaaaagatttgaatagacacttcaaagaagatttatggatgacaaataagtatgtgacaagatgtttaacaccatttgccagcaaggaaatgaaaattaggaccataatgatatatcactacacactgattaaaatggctaaagttaaaaacaaatgaccatgccaagtgtcaatgaaaatatggaggaactggaactcccatagactctcacaataatagccccaaactggaaacaacaggtgaatgaataaacaaatggtggcacatcacacaaaagagtattactcagcaataaaaagaaattagctattggtatacacaacaacatgaataattcttaatataattatgctgagtgagagaagcaagattttttaaaaatggcatatactatatggttccatttatacgaaatgtgagaaaatgccatttattctacagtgacagaaagcagatgagtcattacctgggacagggacatggtgggttaggagcaggaggaagaaaaggattacaaagggactaaataaacttttgggtatgatgaatatgtttattatgttaatttgtggtgatggtttcactggtgtacatatatatcaaaatgtatcaaatcatacattttaaatatgtgcagtttatccctgacggctcctaggagctcacagcagcatccaggtgtctgtctttccttttctgtggccagaggaaggatggtaaccagctggctgctgtggccacccttgccacttcatcacctgcatggtaggctgctgggatgtgggatgtgtgtttgtgttctatgtgaaacctttgacaaagctatgtgagccctttggagttgatgggaagttacccaagggtgtcaatatagatgcctgatggggaggcagaggagaatgtgtggagaggaaggagggcagacagatgaggccagagaagctgcataatggggaggaagaaggcaaaaagaggtggcctagaaaggcttgaggaaggaattaactttggctacttgttcaacacggccctggcagaatctctgggaagaataatctgggaagaagctgggtcttggcggtaaagtagtgggtgcacagatgacttcatcctacacaggagccttggggtcaccggggagagagcactggacttagcatcagacgtgaagtctgtatccaactttgccataagctgcataatcttggcgggcttcttttgctatctgagccttgggcttcacagagagacctgggcttgaagatgcacaaacctccttgtagtactgtcatttactatcacaaacaacttcgtgaccttgagggccactgtatagcaatccttctgactcattgtttttgtttattcgttttttctttttaatctacagaaacgttaatggacaccagaacggctactgcagagctgggctggacggccaatcctgcgtccggggtgagtatcaaaccattcgtctttcagtcctgctatgaggtcctggatccatatgatatctaggggagtagagactacccagagcagtacctgtggggaatggaatacaggtgtgaatggctgtgtccactgcccatccatgcaaagacagcaccaggggtctcagacctgagctgctgcctcgtgtgctgatgtagaccatctcttgacacagtcctttctgaaagctgacacctagacaactagggccatcgctgtgtggggatgggggcacgcaggctagtggcactgaggcagatcagagatctgtgatgcccaaagggctgcagcaaaggcaaagacatgagggaggaggtagagttcagaatggctaagctctctttcacctagaccttgccttggagagacattaatgatttatttgtctagtgttcatgtaactggccagctacaaaaatagattatccttgaggagctcgtggcctcctgtgggaaccagtgtgtggcactggagatcaacaggtaggtgtgggcacagagttgggaatgagaaaccatgaggttagacaagaagcctttacagacaaggtgtgagcaagctgggttttagagcatgagtaggagattgacagatgttgtaaagagagcctggaaagacgttctaagtaggaggaatgccggttgaaagggatgatgagattatgaaaacacataagagggaagagtctgtgtgtatggaagagagcatggtgtgaatgctgctgagatggggctggagggtaagttggaacctggaagggtggcgatggactgtgactgccatgctgagcagggaacttggattttatcctataggaaatggagagatcctgagcaggagaaggaaatggtcacacttgttgacaggattgtcgagaacagttgagagaaaggcatttaagaggctctttcagctgtcttgggtgtgacaaaagaatcaagttaaaataggatatgcagaggctagtttgagagaagttaaggaggacaaattggcaatggatggactatggcaggaatgagagaaagagagaggaggtggagatgatgttcatgtccctggcttgggcagttggctaatttcaggggttaatcatgaagggagaaggcaagaggaggtgggagtgctctcttcatcccagccagtgggtgatgtctggctaggacagggtggccctgggcctcctcctctgtcccagaccttctctctgcgtcccatccctgtaacctctatgccccatgaaggatctccagcatagcacatcatcaccatgccctggttctgctgcaggggtggttctaatcgggacatttgggtcacagggcagacagttatctcacctgtgcattctccactggtttctcactgttactttatcccagcatttgaagaactgcactgctcgaggcataagcatgatgccttgaaacagggaagcaaggtccaaaatgagctggcattccctaaagcagggagcagggacaggggcagagccagaccacactgaacaaggccaagtcatgccagtaacactgtgggcaaccaggaaaaccttcccacttttacttgggactttatgtaaagctgatgaggcagcagttcttccatatcacctggatattaagaatttgccatcttttacaaattatgttattgtttgaaggcttgtgtgtttttacaaggccccaacataatttatggttaatttttcccttggtttttgtacacaacacctgttttctttatacttctgatatcctttcccaaggaagattctccttgagggaaacattcaaagtcaaggcatgccctttagagacagcagctgcctgggctctgcctgtttgccctccccacctgctaccagcatgctcagctgcctttccccaacactcattgtgaggcaagacacagccagatcattctcctggtgcctggagtagcttctgagtctgtctagtttacagtgacgagtgggagggtcaacatggcctttggtctgggtggaaaaggaggatcaaggactatgcttccatcccaggcctgcttgtctgtttcctctgtgctcttccaggacagtaccctccaattctgtgaacacaccagtgactcccaagttagtatatctggctcagactcacatgtctagctgccacctctttcactggatgctcatgggcatatcggtctcaacatggccaagcagatctcaccccttttcctttccccacgcacacacgtgcattctctgtccaaatcttagcacatttataaaggccagaaactgattcttgacttctccttttattatcttcagatctctgctcgtgtccatcctcagggatacgctctctgcatcccagccatgttggataccccatcacaggtcttctcagtgccagggagctttaccaatagcacaatacacagtcccaaagtttatacctctctgtgttagaattggattcatttctagccccccttcagccatattataacctccggggtggccaggactctatgcatttgttcatcattggcagcttacacctagttcactacctgactcaatgtttcactattgaaagtttctgacttgagcaagtgggtggatgatggtgccatccttggagtcagaggacacaggaggaggagtatgcttgggtgggaagaggatgagtcaatctgggacctgtcaagcttgaagcgtctctgaggcacccacgggaaggtgtgccatcagtattcgacttaggggcaatggaatcagaaggcggccgcatgtcagtgagatgggagcctggggcatggctgcagtttcccaggggagtgtccagagaggaaagaggtgagagctttggatggataacctgcactgaagtgccaaatagaacctgaccaggagactgggaaagagtgggctgggagcaggagaaaaccaagaggaggtccagttttagaagccaggggaagagtgtgtcagggaggagggcacaaaagtggcaaatgcttctgcgtgttaaacatttccactgggtttagctgcaagaaccctatggttaagtatacagatggtttcagaggggcccagcacaggaagccagaaagcagagaggtgaagagtcagtaggaggtgggcagtagagacagcagttggtaagagaaggaggacagagcttggtagacggagggaacaaggggctgtgggcacatttgcctttcccggggaaatggctcctttcctgttgaaatagcaagacagagataaaggcacctacagagagctgagagtgctcagttttgacgtgacagagccatgaaatagaaaaattcctctcagctgcatatcttctctatgaggttggaagtgaggtttggagggtgaggcatgtggagtccaggtagcaggtgttgagagggcacaaaaggaactgctactgagagctgcagagaggctgggcatatttcagaggaatatggcaaggagtaagagctgaattgtggctgacaactgtgcacgggtgaggatcctgatctacaggcctccttcagctgcctgactgcctggaagagctgtggcattgggatcatccagagttctggttgcacaggaaaaaatggcaggactgaaggggccaggggctgaggatgctggcaccttatttcatgacatataccccacaggaaagagtgaggcgaggagggactggtgtgaccagcccaggggccccagatgtaggtctcagtgaggctaaagaacagatgtgatggcatggctgggactggaggaagacctggcaccttgacttcagatttaagacacacagaggtcttccgggtgaagaggctctgagtggttcatggtgtgagctgctggagcagaggaggatgaacttcatggcactgaggagctcaggtgtttgagaagccaggaggcttgggagagcaggggtcctcctttttctgagacctagtatggagaagattttggagagagagatggactgtcagcccaaaaaggagggaaagtcctcagattgtttctctgcagtcaggataccatgcatggatgtttaaggcagagattgttctggaggcctcaaaggaactgggtttgccccatccagaggaggcacacagtgctgccaggggcccagctggcattgcaatgggccccatccacagtgcatagcctgtgtggcaggctttcagacccagagagaggccaagggactcttccttttatggggctaagtgtgtgcctttgatgctgtacttgagaactaccagatataggaaggggttggaccactcacctacacaaagcccacaaatcattctcagttttattgttgaaaagcaatattacgtgtcaaaaccagaaagtacgcccagattaaaaatgctgctttataatctattgcagcaccctgcctttcattgaaggcctttaggtttaatctaaatcaggggctacctggtgaacagaggaaaaaggtaacaaacacatttacaaagtaacaaatgccagggagaggctgagctcccactaacgggctatcccagggaccctcaccacaggccctggtgaccctttctttgggctggcttctagccctggcctgaaagactccctaacctttacatttctggacctctaggcagtggggagttcagagaggtcctgtggataaacagtcagcgctgtgcccaaccatgggcagtgctctgtaagtagcagtctttctggttgcacctccaggtctgctccagttcctagatgctccctggcctccctactctgttccttcttcccgacactctgtctctcaggtgtcagttttgttctcagccccactgggacgctcctggatgctcctcccaccatggctggggtgggtgccccatttttttaagcctgtggggctttgtaccaacctctaacatactgtccttcactctgtaagttaaataactgttgatgtgtcagtctcttgcactggtcagagaatgagccagctccctctttgtgtccctggtgcccagcaccagcctggcataggacaggatcagattaatgttttgttgactgagtaaatgaataacgatcattcttgatacctgtctgcatctccatcacaggcccctgaacttaggagacacttaatttaggtttactgtaacccaaatgcactgtaacatgtttgttgtagacctcttaacacccaattggttgtcaatatctttttaaagagcataattagtgatgcacatggagccacttctcctgagataagcataataaaggggaccaggacaggcagaagaaagtccctgttgctttcagcccctggctgtgatggattagaaaggcaaacctagtccctctgatcaagaggcttatttaacttgcttgttggaaatctcagtccacagttcttttacttttgaagtggttggccagggctcatggccatttgtacttgggccaccattggcctctgtgtgtgtaagtttctgtgtttgtgagatgtgtggcttatgtgtaaacatctacctgagttcttactttcaaaaaagtgctgcgagggcttccagtctcctcctcctgtgctgtcctctggaaccaccttcagggcctgtgatacgctctgttgactactgtaacactggcagatcttcaccataggaaaggggatgcgatagaggaaaaacaggaaggaagtccgaagccaagcctcatgaaccttcaggatgagtgagctgggctcatgtgtactccgtgtgtatgtatgtgtgcatatatgtctctttagaaatataagtatgtgtgtgcatgtatatatgagtgtatgtatatttgtgtatgtacatatacatgtgtatatatgtctgtatatatgtatatatgtgtgtctatgtttgtacatatgtatatatgtgctatgtgtctgtatatatgcatacatgtacatatgtatatagtgtatatatgtatatgtgtgtatatgtgtatctgtatatatgtgtatgaatatatatgaatgtatatatgtatgtgtatatatatgtgtgtgtctgcacacatatgcttgtatgtgtgtgtgtttgtgtgtgtgtgtgtgtgtgtatgtatgaagttaaattagctgatctcaccctgtgcttcagtaagcagttctagagttctggaaacactttcaataacgggaggattattagactgaatggagagcttccagagcaggcttctgtgaagggaacaacacgtatctgaatgtccatgtttggtaaactaactcctgatacgagctacatgcccatgagtgccggtgcgcaggctgaatgcacagctgctgcttggttgtttatgtgtgcgctgtctaggccacttggcagcccctggctgtctcctcagtccctgtcagatcccccaccagctgcccacctcaagtgactcaggaaagcacactcaggagagaaacccactctaataacacctcatccattccaaagccgaacaaaatcaattacgatttatctggtctgatgggtaagacctttatggagaagcagttaaggcctcaggtcctggcatcaaataaactggctatttttctggatctgcactccctgcctgtgtgatcttgggtctgttatttagacttcttcagtctcagttttcatttctgctcaatggggtaaggataataactctgtcatatatgaaacaatatcagtaaaaagttttccttggtaaacacttaggaaatgttagcacatcactaaccctctggagggctgaattttctgttttctccctttaatgattcaatcatgcttattaagacagaaaagcctgagctagattagaaaaatccaagagaaatttagctctgggcaaaatggttttgtgaatggaatttcaccacatttgaatttcaggacatgccagaggcaggagggcagaagaaggtggggttggccatgatttctcagacaggcaccactgaatggggacttgggagctttggacctgatcgcggattgctggaagctattctcattctatgctttagtatctgtcatgactttttggtggccagtgacagaaaagcaaaacccactcttgaaggatagcttggctcatgaaactgaatggtccaggggctggtgtggcttcaagtttgggtggttatcaatcgatccctcctccccactctcttgttttatctcttttctctctgtcttcccatccttttttctcctctctctactcccacagtgtaggtttcatgctggagttcttcttggtcctaagacgtctgtctgcagcagccccagcccctatagcctttttcatctgtatgccctggagaagatcagacatctcctcctgggtcccccagtaaaagccctggaattagctctgagtgggcctggctggcttggcttgaatccctctcatgctcactctggaccatcccctggggaggaaattgacactgaggtaccgtgtccattcctgtgttgtggagagcctactggaaggccagggagaaaggcaggagagagtaacagagggaatcaggatatagggaacggaaagatgactagatgctaggtaggaaaaaaaaaatctatcactgtatgacagaccctaagtgccttatagccaggcacacatgaatcctcacagtagccccattttacagatgaggaaactaaagcacggagcagctggtaaattgcctaaggtctcatggtgaaaaagtgccaatgctgacctttaacctcctggatgctggctctcttgccaacaattatgctccactgtcttccccagtgaaatgctacccatcgtggtatcttcagagagtgggttccagaaggaactcccagaccaagcctccttgaattcaggctcagtctgcaaaaggttttcttttttctcacggtaagagacatgggtggtgtcctttctctgagctgtttcctaggaattagtaccactttctcaaccgagaggcccagcctccctgctgttgggcctctgacctccctgttccctccctcataccctcccctcctattccctcttcaggtaaaccactgagataagtcagagctccccaccctaggcctcccacccactctttatctttttctctctctaccaaaaggcctgtaattaggaaacattagcaggctcaaaacagctttcatacctgaaacatcctccataattgcactcagcagagctcttccctggctattaatgtcacttctatgaagcaatgaggaacaaaacacccgaggcacttaaaacattttttatataatacgcgtcttttaggaatggaagtttaaaatcacctgcctgacagagacagtgatagacaaaggcttgagggccttgggtgagagccaggaagcaggccctcctccaagtgatggaaggcagtggccacgagattcagatgctgctctgggaagagactccagggccgtgcgtgggtggacctacctcaatggatccccaggggaggagaattgggccagatgagcagcaaggccactgctctgcctggctccattgcttgtggttgccttcatggtgctttcctatgagactgtttttatgggcatgtgtatgcatttaacagaaaggtgaatagaatgccacagatgacccgtgttgtgcagtagaatgtcaatcattacactgattgcagaaatatattggatatgactttgtgtgtgtgcggtatgggtgggggaggggagtgggagagagaaagagagagagagagaagctttcctagcttgctgtattaaacaactttgggagttgtggtggttcaccagatccttactgtctggcatatttattttcttgctcttggaaatggctcatagactcattcatcaacagagcagagacatttctgtccacagactctgggagggaattccagaggttacctaagcccaccttctccctattggaggaatgcttaacccttgttggcccagacaggtgtagttccatgtctctaaaaccttccccaagaggacagtagccccactacaccccttgtcccagtcttggaaacctttatgcaactggcatgtgagcctgaggactgactcattgatgacagcacttatcaaattgaaggacaagtggctctccagggcaggagaggacacagggctcctgacaaaggcactgggatggagctgaggagggtcagcattgccctgacagcctgaactcacagcactcccactggtgaccttggtgaaggaaagaaacatattattggcaaagacaaagcattagaaggagagtgaggataagacgaacaggaggaaaacaggcgaagaagggagggtcagggttgtcagaagaaagatgagcctggttccaggaaggaggaactgagcctctgggatgttggctttggccttacttccagttatgggcaaaagctatagaataagttggccaaaatcccactatactttcaatagtatgaaggatcatgcccaggatttgggatctgatgtcctgggcttatttccattttctgctaagttctttagcctctttaagtccatatgctgcctttataacataggtaatataagatcttatatatagagtgattgggattacattgtgtttacctttgtaaactgtaagactcagtgcagtaccacttgccctgattagtactagtggtaacaacgactcttgttcgaaagacctaacttgtatgggatgagggtggcaactgatgaaggagggcccctggagacacaagatcaacatgataggttgtgattcttacatgaacaatgtcagagagcacaccctgttattaatagcagtgctattattaataatgataactattacactaatcatcacgattaattacataccaactgtgtgccaggcatcaagctttacttgtatgacctcacttctcactgggaccctgcaaggaaggaaggtggcatctctcccatttccaaagttccatttccaaagagctattatccaaagttccaggactaggtgggggtgccgctgagactgaccccaggcttgtctaaccacaaagctcgcttttgtatctttgcccctgaaggagtgtgaggagaggaacacagactcacagactgttgagaaaccagagaatggagctggggtggggaggagtgggaatgaggaggggcaaatgttcaaaaagaaaaagggtagctttttaaagtaacaaaccagtgagttgtgcacgtgataagcacctgataaatcattgtttaaagcaagctgtatgggggaggtagaggaggtggtttggggaagtgtggggttgggggaccaaagagcagcaagtcaaagaggagcctggagcaggtgagccctggccagagatcctcaagagaatacaggtggtccctgtgtatgtccggctccgggcagtgatggaggagcccaagaggattccttcccaccccctaggtcctgacaagtgttcaggaagtgaaaattgctgggaagggcagggagagctgtgagggtttccagggagctcctttgtcccatccattgtcctcagtgtcagtggggctgaacgcgcccccccctccatttgagatgctgctctgacaatagaatgaggctggggtcccatcgtggcacatccttatctccatgcatgcttgcatgctgtcccacttgttgctctttctggtggagacaggcatgtccaatacatttcccagtgtcacgaaggacagcctacatgacaaatgtaggagtcaagattctgacttatctgctgatcaagagctttgcctttaaacaaatgtggcaaatgttaatggtctgtgtttgcctttaggtgcaaacagttcattatgtaacaaggcaggggtaggcagtgcttcaagtgatggggacctgtgtatgactggccatatcttcacggggctgaccgtgggatgcaaatgcagggaaggccagactgatgtctgccatttggagcagtcctggtgccagttgaaggtaatggtagccccactgtgtgcattgctggcctgagcatagctgtcataagaggcttaatgtgggagctgaattttaaaggggacattggaaaaattagagtgtgtctattggggttaaccagggaccttgtcattcaaagaatattcttgcacctgggaagccaagtccaggaggcaaaggaatggaatactttttctcaatggaggcagagttttctgcagggcttcctaggaccaagctccagcatccaaagtcccaggaaaaagcagtccctgaagtggatcacacatggtggccacattcccacccaattgggagaacacacagaatgtggtgggggtgtcctctcttgaggccagatgtggctttttttcacccagagactgggaatttcctccattgtaagaatgggaacgaagccaagagctcctgccagaggccccaccccttccttctcccatggctggctctcttgtttccaagacagctttggctggccccagccagcatggcttacgctcagtcaaaacttcccaagctcatggaatgaggagcccatttccttagcctgtaacccagcatgatgggccagcttgaggctggcctctgctatacattctgagcagaaatcccgccaagctgaagggaaatgccatcagtctctcccaggggtgactctctgctcctctgtcaatggagtccaggcctgggcttagcagtatcaagcagctggggcctggggcctgcagctcccacccctgccttgttctacaaggccgtgttgggcagcagtgagagccacattcaatcgacagcttaagataatcacatgtgtgaggcactgcaataatggcagctgaataccctgccgccgttgccatagtgaccagccaagcactggttccctccttttttttttttttttttttcctcctttcttgttttctggacctccttgttatagggctggctggtggggtgggcgatgagttggggaaatgggaaaggaggaaagggggaggagagacccaggaggggcagcccattataccctctttaaataccccagctggaggtgttttaaatctcaacagagacagagagaaacagtgtcttaatccctaactccctgtgaattatttaaagagatcttgtcagaaggatgaatttgtcactgttgcagtgtcaacagcagcagcagctgtcataatggctgaggaccccactccaggcagggcctggtacgcaatgctgctgcctggtggaggttacagtgccccaggggtgtatagatagggagccccctgcccagacccaagcctgcagtattttccctaacatgctggtagaaacctgggtgtgaaatatgccggagtataaagaggtgtgtgcccttcagagctcgtgccctgctggccttgccctctagtagtgtggctggacctgagctaaccagcgctcacagggccttccgatggtaggcatacccaagggagggccatggccaacacctcagctgcctgcacttacacacacacgcccaagcacgcatatatcaatgatagatgcacaggtgctgacagacagacagaagagtcatagagcatacacatcatggagggagagtggaattccaagaaaaaaataactgatgtgcactcagagagaggctaagtgtgtgtccccagagggtagctattcatgataactggctcacaaggggctcttactggggtttaattaccttgcaagcttaagtcatgtttaatcctcacaattgcctcacgagataggtactattaggtactatccctgtattgcagaggaggaagtcgaggctcagagaagtttaaagacttgcccatggtcacacagctgggtctggcggactccagagcctatgaacttaccccgggctaagctggggatccgcatgattatgggttgggcaaggttagagcagtgctgttcttaaacccccaccccttttttgatcatcacaaaaacctccttcctagcaatctgaatatactctgcttgaagccactttctccaccttgaccttgttacagtattatctgcatttctctaccatccaagattttgtggagctctgctcttaaatattgcattgggaaacaatatgtatatgtttgtgatattccagttatgtccctcacccccatccccttgctgtgatgcatttccaggaaggcatctttgctgtgagttcacagtttagggaattcattgctttgtactgctacaatatggaagcccttccaaggcactgggctttcagaagcagtctccaaccctgagtcggtcacctttctcaaatggaataccacatcaggccatggtaatgaatggggggtgggggggtggcattcctgtcctctcagcccagcacatctgggacgtaaatcaagcatattggaaggtaagctggtgctcacagccctcaggggagcctttgagtaaatccctgccttggttggttggtgtagtaaatggtagatccctctgggcttgtaggaatttatgccccacggactgcattttacattttaattagccctctagcttgtctaatatccaagctttttcaggcttagtctactgtctacacgggagctttgtccttggggtccaggctgattggtggggaaggcttggtagtggtggctccagcccagccctgagcatctgctgccctgaagaatctttggcctcctgtgggctctgtgaagttgtgtgctgcccaggctccagtgggcttcttgttcacaggggcagccatctccccggattgggcaatgccaagaaagctccattatggtcccacaggacatggtggcagcaactgtttgcaaaatagcagcctccctcaacagcagtttgtgcccaaaaacagactgctgaatgggaccagagcctgtaagatgtgtccaattttgtctccttgtggtctgagctggtggctgacagtggtccagggattgctggctcaagagaagagagcctatgatgaaacagctcagaggaagccctggagattcccagagggaaagggaaggggactgctggttgtttctctgtgtctgtaaggagagggagtttagccttttagttcctgcattctgctgaccaaagggtaggattatttatataggatctagatgatttccacaccctggtgactcagctggaggtggatcctgaggttaacataatcacgatgatgatgatcataataataatgttaataattggtactcagtgaatggtagttatgtgcaggcacagcactagatgagctccttccacatccatgatctttcagtcttcgtattaccctgcaaagtaaatagtattttgcgagtgaggaaactgaagctcagaaagttgtctgtgatcacagagctgtaactggcagaggtggggtctgcctgccctggcaacctctccagcttcatatctttcagtgtttctcttgctgtttaaacttctgtagccacactggcatcttggctttctcagcaatgggccaggcaccttcttgccctggggaacttgttctggttgccctctgtgcctgggatgctcctccttcgtgtaccctccaggctagctcctgtgtttcattcagatctcagctcaaagggagatcttccctgattaccccactgccagctgtcactctatttcctttcctgcttcttagtagttgttaatgctacctgactttatattattcatttgtttgtttgttcatgctttggttaactctagtggaatataaggtccatgcggacagggattttgtctctcatttactgctgtttcaccaactcctagaatgttgcttggggctgctgtagtagatgtttgactctttattaaataaatgagataaatgagctgggtttgaaacaaatcagaatagctgggatcgtattaggtcaacagaggccaaaaagcctatttcaattatttctattcctgtcttaaataaaggtgtccagaggaagtgcccctttccagccaggccctgtagaaatggtttattcatggaggttataatgatgcagcatcatgatagtcattgggcattcttagaggagcgggcctggtgtggggtgggggacattgcatcagtccagggaggggccaactatcaaacatctttccagaattctgtgcttggaattgtcttcagaggcacagagtggaatcagctcaaatctctcaccttcattttatagtggctcttcattttgaccagtaatattatttcttagtttgctcaaccatctcactaatcagacttggttccaaatgatctttgcctgtgtggggtgggggacattgcatcagtccagggaggggccaactatcaaacatctttccagaattctgtgcttggaactgtctttagaggcacagagtggaatcagctcaaatctctcaccttcattttatagtggctcttcattttgaccagtaatattatttcttagtttgctcatccatctcactaatcagacttggttccaaatgacttttgcctgtttctgaaattcaaatccactcttggggcataaagaatgtgtcagagtttctgaaggtttttctagaaggtagtgtagatggaccaatgagtagagcccatgacaatgattttgaaaggggaacagtttttacagataaatgagttttgatagcatgctttacatatgcacacagacacacacacacacacacacacacacacacacacacacacacacacaatcagccagactgcagagagtcaatatgcactgtccaaatgtcaacaggcactctagcaatagaactgcaagctctgacttccaataagcaagcctaacaaacctagatcttggagagacctgaaagtgtctttctcatacatcaaagtcatgatctgaaagcctgaacaagtactttctaatggatgtcactgtttcctttattatgcttatctcaaggacaggtgatccatttgtgtcaaaatagtgctctttcaaaggcagttaataatctgttggttgtgcaaggttgatttgtttcttctttcacaaagacaggttagcctggtggcacctgcagtaaagaagggagagaagttaaagaataggccggggctctgctcattgcctcagtcttccaggatattttgagggcttggcactgggaatatggagcaatacccaacacagtcccagcctgtaggattgggttcatatgggagatggatttgtattttagaaaactcatacgagcaggggaattaaggagaatgactgggagagttacttggagggtaaagagaattcaatgacgaaacagaaggggagggctgaatagaagagctatggagataggagacatagaatttgggggttaacctcctatgatgaggagcaaaacaaaacaaaatggagagggcagagtctagagtgcttcctagtcatctggtactgggtggttgaggtgtcattctcagacagaggtgagactgcatcagggctgcaaagggcaaggtggtgcatcccggttatttatcaggaggcatccagcaggcagcagaatatacaagtctggggtattggggagaggtcaagttggtgatgcactccatggtggtcgaagccttgtatatggatgagatcacctaggataaaaagtgagatgaaaatggagtggatttcactggtcccagatgttactgaataaaatggtgttccataattccagtgttgtgaagctaaatgcatggaattatttttcttgttgaaatgaactaataaattagtcaaagtttaatttactgtcctgaaggagctcacagcctggtagcagaaaccaaagtcacacaagtgaagcaattaaataatatttcaaaacagtatattatcaaatgctaaattgcgtggaataaactcaatcatgctttatgcattcagaaaaatggcagataaatctaagccagggaaaggattatggaggaaataagactggagccacctcgaaggaaggatctgcaaagagaatccagccctgccatggatccaccacctgactttgggcctggtattgaatgtctctgggcctcactctgcccatttgtcaacaaaacgtcatgaccaacatggtctagagtggtttccaagccacatctgcctttctctagctcagttcagatgggatgagggtgaggtaaaagaagggcatcagggtcagtcagaacatcagcaacaacatcgaggggcagaaatgggcatgggctctgttgtccagttatgagaggatatggccctgctttgggcccttgacatctcttgccctgtctgttgtcactatattccgaccagggcatgaggtgatgccagccctagtgcactggtcataggaatgcaagagacaggccagatggggggatatggatggttctggaagaaatggcacattgtggtgatgaagtgggtgtgttgaacttggggagcatttttggccttttgaatacccgactgacctccaggttggaaaatctagtggtcctggaatggggtcctgagcccaagattctgatgctgactttggaccacaccctgatactccccaggtcctcagtatcagtgatagggatgcttccttggcctcctagcccctctagatgccacctttgcctcaacttaggcatcattcataacatgtttgattgaatgaatgattggcacttgggatacagggataaaggggtaagaaggtcatccaaggtacagatgatagaatgagaaggggcataagtcaccatgaacaagctacgtgtggataatggagaccgtgcgagcattgttgggatactgaggtgtgggctggaccagataacagaggggttttattttaaagctatattaaggtattatttacctgcaataaattcactcattttaagtgtattaaagttttaatcaattcagtaatttttttgtaaacttacagaatttgtaacccatcaccacaatctcattttagaacatttttatcactcctaaaaagattctttatgccagtttgtagtcgctccccatttccctctatggccccaggcaaatactaacatacctctctgtctgtagatttgcctcttctgaacatttcatgtgtatagaatcacaaaatatgtggtcttttgagacacacagctttcctcacttagcataatgttttagagattcatcatgttgccgtacgtactagtacttcattcttttttattttggaatagtattccattgtatgggcacatcagattttgtttatgcactcaccacttgacaacaaagggtcttaggtgacatattaaagagtccagctgagtccagtccaagaaaggaggacaacagtcaggttagcatgaggcaagtatgaagcttactcctcatataaagatgtatgagaaatgtcctataccttattttcttttagtctaattatttcagattcttctgagtcccctataccactggttggtgagaagttcaatctcaattaatggtttctctttccactaggactatgcttccagaggtcttactcagcaaattctgagaaggctactgtattgtccaaaggccagtggtccacctgtaggttttctggatatgaataaagctctggaggtggtggtggctgcagttgataactttgtgtgtacctaatttcacgtagataaaagtcagaaattatccttgaagtggaattgctgggtcaaagggtgtatgtagtcataattttgataaataaaaccaaaatttccatagaagttgtacaaatttccttttcttccatttgtgtgtcagaattcttatctcctatgtcctgtccaacacagtgtgctatcacacttttgttctttgacatcccccaaaaagtatcataatgtggctaattaacaactcacactttatgaagagtgagattcagcatcttttcatatatttaagagttatatctatgtcttttttagtgaacagtttgttgataccctttgcccaattttctatcttgttattgacttatggattctctttatatattaggggatattaacactttatctgtggtaagtaacaaatactttttttctatcaggttttcttttttcctcccttttaaatttgctcatggctatttctgtcatgccaatttttaaaattgtatagagatgaatttatcaatatgtttatttatggcttctgagtttcatatcacaattagtatacaaaaattttctccatggtttcttttagtatctttgtagtttcatttttaatgtttaaatcttgggttcaccagaaatttattctggagtaaggtataagtatggaacaaaagttatgttttcttttttttccagatgggcacctagttatcactacaatttttaaaatgatttaccttcttcatattgatttcagttttggcccacacttgaagtattgggagaagctactgaattgatttctagaagatttcaccagtttatacttccatcaataggcttgggcagtgctctttttcccaccttcttaccaagacttgacattttatctttttaattttctgcaaatctgataagcaaatcatggtgttttgctgttgttttaatgggaggagataattacaggaaggaatacaagaagcaatatgtcaaatgcctagaagtggaggctaagaagcagccattgaatggaagatctttaggaaactgactttcgggcaggcagtgagaacacattgccagaactagaaccagcacaggctttgggtaaaagaaatttggccctgaataggaaattgggcatctacagtgtagtgcatgcaagactggtaaaattcccccttttttaagaaaagagagagggaagaggtgagtaatcatcattcctaaggatctgggaagcccaaagccttgttggcgaggcaggactgatacctgaaagagtgttcaggggacacatggccccttgagtctgtggctcagtgaaggtctagagattctcccctaaagcatcgttccagtttttgctggtctgttccaacctaccatctcttgcctgggcacccacaatgaactccagttgtcctgcccatacactcaggctgctctcaaaacctgtctctgtagtgcgtcagagagagcttttaaaagctcggctctgatcgcctgtgtttttttctccctaactcatcagcgacttctagttacactcaggatgaagttcaaaattctcaactggattcatcttcctctcagtcctgttcctgccacccccagcttcttatggctgtctgtcacacagccttcattcctcaatggcaccaggccacttttcctatcatgaggcctttgtacctgcctttgtttggcccagaggctctgctcctattctgctcccagaaggtgcatacttctcctggcttacttctatctacctgtcccctctcagcttggagggtgatattgtttggatgtttgtcccctcccaatctcatattaaagcatgctctccaatgttggaggtggcacctagcaggaggtgtttgggtcatggcaggggatccctcatgaatggcttgatggtctccttatggtaatgagtgagtctcactctattagttcacacaggagctggtggtttaaaagaacctggcatctctcttgctccctctctcaccatgtgacatgcctgctcctccaccttcctccatgattggaaacttcctgaggcctcaccagaagtagattgtggtgccatgcttcttgtacaggctgcagaactataaaccagataaacctcttttctttataaattacccagcctcaggtattcctttatagcaacacaaaatggactcatacagagggtctttcctgacaatcttcatatatccgttgcacccccgtgcttggctccctgtaattttccctcacagcagttaacacaaatgtaattatttagttattttagtaaccattttctaatttctgtttctctcactagattataagcttcatattgttatatccccagtggctaatggcgcctggcacaaacctaacattcagtagacatttttttttcattgatgaatgaatgaggtataaatataaagcaatgagactgattccaaatattgtaaatgaagtatatgtttgtctctctctgttgggaatgccattctaccctcatctcgattaaccaacatctcctctttcttcgacccccccagttctaattaccacttgctgtggaaagtatatgtgcctcctgaagcccactctgatcacttatttcttcaacccctacagagctttcactgacagaagaatgaaagagggaaagaaattaatgggaagctctatgatggccttttcccaacaacagggagttattttcctttctctcaatttgcttctactctttccctttgaatatgcagctgaatttcctctcatttgctttgatcactcccttaggagctgtcatggaatcaattagatctgtagaattttacaactcagggtcacccattgtgatttctcattttacagatgagaaaactgaggcccagagaggttaatgtttgaaacaattacttctgctgggtcttataataccaatcagtgtcattttctaagataaattttctcaatatctcagctcccataggagagtagaaatcctcatgctgcttattttattttatttttttgagacagagtcttgctctgtcacccaggctggagtacagtggtgcgagcatggcttactgcagcccctcctgggctcaagcaatccgcccacttcagcctcctgaatagctggttctacaggcacaagccaccaatcttggttaatttattatttttatttttgtagagatggggtctctctgtgtcacccattctggtcttgagtcctgggctcaagccatcctcccacctcacccttccaaagtgctagaattataggcataagccattgcacctggcctcattttgcttatttaaatacctcctggtggtgactgtctcagtgctaaggtgaagcccacatcagagctcctttagtcttgggtgtgtcaagaactctggctgtgaccagacccccactctaaatggggtcacatgcttcacctgtacattgacagaggggccccatgtgtgtactgagacccaactggaataatggatcatgagactgttgtgtttcaacaatagcagaacagtaaaaaaaaaaaaaaatttcctttcctcaagtcatgtagggtcaactgagaaaatgctgttttataacagccatggaaagggagggaggtctaaaaatttgatctgaaacattgtcagtgacttctccatggctgaaaaaaaaaataggcaagcagaacgtaactttaataaacacatttgatagaacaaaacacagtgttcaagaaggcagaaaaagtggttcttttacatctagagaatcaataaggaattaggcaaagtccaggtgaggctcgacagtgtgaatttatactccatgcaggccacagaggtgagacatctcttccgtgttggccacatggtggggcctgggcacagggatgtccatgtgctgggcacaaggcatgctgtgaaggagctgtgtggactgtggatgcgccactccagcgatgtgctgcagccccctcagggctcactgactccttggggaggtaggtgccccagggccagtgtgcacaggttcttacctgttgcgtggaggatggactaatatgctatgatatgctatctaattaagtgaggggattttccagagctggagtaactcaggcaaagaagaacaaaaagccatcctaggtagaaagcacagcataagaacaggcctggaactgggagacagagttgtgagtttggggatgttagtctttggcattgcagaaagtagagtggagcagggagagatgctggtgggtcatgaatggtgtggttggaggtcaagtgctccaacttgaaaggtggagcgctgggtgatatttggcctggtgctgagactatccaggatagtgaatcatgatggcctgtgtgtcccggaactgctgcaaggatactggcaggagctgatctgttggtgagggactggcaggacttcaagttggtgagggaactggcactctaggagtcctgggagtctggggtccaggaggaccctggattaactgcagtttagatgccttggtggcagaggcccagacagaaggagtgaccatgagtgacgtcactttacagacctgggcatgcagggccagctctcaatgtgcccatttccccacctctccacactatgcctgttttttggtttccttcactcaggtttagaggacagccttgcttctatccacttgcctccacagggggctttactccttgcaaggagcaattgcagtatattttccatgcacacataattggcttttagctctgttaatgaagaattctagtctatatatttaaagtccaccactgtaaataattagcataatattcaaagatactggtatgatttggttaccttgatcaccactcctaaatagtcaaggatcttaattcattttcactttaggaagtttaatttcttttctctattttttttaattctaggcaaacagaatataagtttaaatttattcctggaaatatcctccgttcttgagaccaggatctggagagctcccagctgtgggcagcttcttccttaactccttttctccaagcacaaggaagaaagaatgacccagcaactcttctttgacccctgccctagagagctcagttaagggaaccatgcctataaagacccctcctgactcccctccaaccctcattgcctgttattgaaataatcttctagaagttcttaggtgattttctttgaccattcaaagtatttcttactagcttctctcataatctcttttagccatataagcatgggtgagttgcatgatgtcttttcatctgtaaattggggataataatacctggttctgaaagttgctgggaatagtgaaagacatcacttaatacatgtgttgttcttctcttttattccaatctacaggactgctataaatgggagctcacttttctaatgtgaatcatgattgtctttcccttaagaaagtttcattattcactaaagtaacaccctccagcattttcctccatcatagccttgcttgaaatttgcacacaatagagcttcatttgcttcattaagggttcttcttagcagcctccacttttaccagttttatagtctaggtctttgcattagtccactcttgcattgctataaagaaacaactgagctgagtaatttataaagaaaagaggtttaacttgttcatagttctgcaggctgaacatgaagcatagtgccagcatctacttctgctgagggcctcaggaagcttccactcatggcaggccaggggagccagcatgtcacatggtgagagatggagcaagagagagagaagggggagctcccagattcttttaaacagtcaaatctcactcatcaccaaagggatggtgctaaaccgttcatgaaggatctgcccccataatcaaatcacctcccaccaggccccacctccaacattgggaatcacatttcaacatgagattcggaaaggaaaaacatccaaaccatatcagtctttcaaagagattgatgttattgaaaaaaagtttatgagaatctaagttggttgagaaaccctgaaaagctttaaattcatgtgcttttcagagacataaaggaatttcaccacaataaagaaattaggttcaaagatggggatttccaaggtgtggatgtcaagtaattggacccccaatccacagattggcttttagagcaggtactgtggaagtgaggaagaaagtccctgccatcacatgggctgaaagctgcatgttgtccccatggatgtaataagctagtcacagaatgagcattatgggttaggcgagggacagctttcttgaatgaagtgtgttatattttgggatgggctgcaaaaaaatctgaagttttcttataagatctttaaaatcaagttgcgcttagatgtgttcatttctcaagtcaatctgctggactggtgagctcttaaggccccttagccccaggattctcctctgctatgcctatttttgtattctcactctctattttgtgtttttgcatgtgtgtgcctgtggcctgctatgtacagtgggaagaagtcagtggctacgatgaaaacctgaacaccatccgcacctaccaggtgtgcaatgtcttcgagcccaaccagaacaattggctgctcaccaccttcatcaaccggcggggggcccatcgcatctacacagagatgcgcttcactgtgagagactgcagcagcctccctaatgtcccaggatcctgcaaggagaccttcaacttgtattactatgagactgactctgtcattgccaccaagaagtcagccttctggtctgaggccccctacctcaaagtagacaccattgctgcagatgagagcttctcccaggtggactttgggggaaggctgatgaaggtaaacacagaagtcaggagctttgggcctcttactcggaatggtttttacctcgcttttcaggattatggagcctgtatgtctcttctttctgtccgtgtcttcttcaaaaagtgtcccagcattgtgcaaaattttgcagtgtttccagagactatgacaggggcagagagcacatctctggtgattgctcggggcacatgcatccccaacgcagaggaagtggacgtgcccatcaaactctactgcaacggggatggggaatggatggtgcctattgggcgatgcacctgcaagcctggctatgagcctgagaacagcgtggcatgcaagggtaagctttggagcctctgcttcctgcccatctatggcagggccagatctgcaaggtttccccaccaataattctgggtcatacaggaacagaaaatagtctaatggcttattataaagctctgaggactcccattcctagtgctaggcctgatgattttccaatcatgtccaaccaggttgtccatatttattattcatggtgagagaaagagatggggagagtttcaaacagtggaaaataacttaataaccagtccataatatttagtgttgaagtgttgaatttatctctctctcttctctctctctctctctctcacacacacacacacacactcacacacacacacacccctatatcctgcatccagccctaagctctggggctggagactttggaatttgggttgccatggacaattcactgaagggtaattgagaagggactgaatttggaaaatattttagttcatttcagtccagctcccacagcactcaacttggtactgaacccgtgtagctcattaactcaaagccctctggcttggctgtctttctctaggggctcattgccaggccctggaaggagatgaaactattggaatgggagtgggactgtatcatgtgttgtattaacttttgcttctaaatgacacagagtagtgcaaactttgcagtttgaaaatgtcaggatactgtgtgctcatattagccatcactagcactagccctagaaagcccatattcaacatgtggcaataaatgtgctgaactggctgcaggctcagtctgctctgggagtgaatagaaggatctggaggcccctcagcttatgcattgtctaagtgcatggaagctgaacgtgggggaatccagggttggggaagagaagactgctttcccttattaaattttgcttggagccttcaaaggtcctgattcttttacaaggaagccttcctatatggacctcagaaatgaccaccttaaccttaatgtacccctagggttacccttagtcctttgggtcttgggggctgtatcagcaacttattctccattgtgagcctcctgccagcttccctctctgatgtcacccccaccctgcctgagcaccagaccagcctatgccagtttacttccccacttaccttgctccccagacacctgcagctgaagtgccaagcaggcttgttagtgccatcagctctgcaatcctttggactcagctaattgcctgggccagagcactcactcagccttcctgaggcctgctgagaacagggagctgcgcctttgtgtctttattggatttcttggtcctggtacccatgacggattgtgtggaaacaaaggagagagagtgccagatcttagatccactgatgcatcaacgtcaacagttttaaaaccatcccagcctggtcccacagtcctcctctttgtcccattggttgggatgggtcactatctttgccatttggcagggtctaagtggggaccaaggcaccaggctgagttcttaaaggcacaggtgcagcagcttcccggcatgcttgcagcagcgcatggtgggtgatttctttggttttcagagggctgccacaccacacttgctggctggggcactctcatttttctcattatatcctgagcagaatggcaggaaccagagcaagcattgattggttctgatttaattgggtctctgggaacaggctttcatttctttgggctaattggaacttttcttttttagagggttctgctgtccgtgtagcttgtcagttacctcctgtggctgtcctgagagggcctgtgaggacaaatatgtaaatccaaattgtttctttccatttctccttcccagtctcgatcccctcctgagttttgttggacatttctaatcttgagctattgtgaacatggcttgactttacaaactacttattgcaaactcattggagggtaaaggaaatggggaacccatggcaccatcactttgcctcttcagaggcatgggaagccacattttggtaatatttctgagcgtggagagtggcatcttgggtcttgtggcccagcatcctggctgaactctgtgccctgaaagggaagagaagggccccttgcccttgtctcaagaactttcagctgaatcccctgaaatctttgcccttaactctgcaggtaactggactctgatggctggcaaggggaccttcgagcaaaagtggtgatcttgggaagactctgcactctttggtggggggtgggaagtgcatttggaagtacttgttactggtctccatggtgtgtcttcagggataggctttccactcatttttggtgctcacggagtgctgccagatggacatggtggccattcacaatggttttggtgtagcccacttagcacaatcatcatgagggcagaagcagggagaatggtggataacagagaattgcaggtgagacacagtgagccttcaacaacgaactctctcccaacacagccctgagaattgatgtcctctgagcctggctgggtcaaatgctgatggctctatgattcataaagttgtgctgatttgatatatcttttctgcatatgtgaaactgggactttgtagggtggcagaaagaataatctctccgcttctggttccatgctatttttcctgcatggaaacagaacagactttcattatggccagggaactgtattttcttggctttcactttgcttctgtgaaaccgtctcctgtcaaagtcgtggtgaccagtcgcttggctgtgcagaggcacctggagaccaattagacagcacagccagcaaagagtggtcctggcctagagctgtttctgttgtgaagagcgtgggtggtgagaagagaacaggtgagaggggagtagaggaagctatggggagaacttgcgcattaggatgtgtggcaagcggctcatgcattttctagagggctccttggcctaaggcctgttcctgacatcctttcttttttttttttttttttttttttttttttttaatttttttttttttaattatactctaagttttagggtacatgtgcacattgtgcaggttagttacatatgtatacatgtgccatgctggtgcgctgcacccactaacgtgtcatctagcattaggtatatctcccaatgctatccctcccccctcccccaaccccaccacagtccccagagtgtgatattccccttcctgtgtccatgtgatctcattgttcaattcccacctatgagtgagaatatgcggtgtttggttttttgttcttgcgatagtttactgagaatgatggtttccaatttcatccatgtccctacaaaggacatgaactcatcattttttatggctgcatagtattccatggtgtatatgtgccacattttcttaatccagtctatcattgttggacatttggtgggactgtaaactagttcaaccattgtggaagtcagtgtggcgattcctcagggatctagaactagaaataccatttgacccagccatcccattactgggtatatacccaaaggactataaatcatgctgctataaagacacatgcacacgtatgtttattgcggcactattcacaatagcaaagacttgggacatcctttctttacacacaggctggtcccatcaggcagagtcacattggcctgctgacctcatctcactagtgactctgacctcatcatgcatttgtctttataaaattgttaattactaggaaaatgccccatctaccccaatttcaagttatgctcatagtgtagaggattaatgagaaatcatagctttgtcttcccttctcccctcttccctgctgaggttggtggctaagtctattctctgtgtaggtcccatgcagcctggctcttcctgtgccagggaggccgagttggctctcagcagactctctctctctctctactgtgtagcctaaaatattgctttagctgaagttggactgcagggaggaaggggaggaggctggggctgttagaaggaacctggcaggggcaggctccttatctatgtgctagaagctcgagggctgcagtatcccataagggtgaccatgggggtgtctcagaaataggcagagaagatatgactgtcatatcttctgtgacaacccctgagtggccagatcctagctggagcactatgcatatgtggatctgttcttcccctgagtgctgcctgagggcttggctttccctcccaggacatagtccttggagtttccagaagaagctgcttcattaggctgcctctttagctacactggggactcagaaaatgacaatgctatgcataattctccctgccatcctctcttgcctctgcccctgccccaggatgaccttagcttgctattacagagggcacgtgccaacttatggtgcctaggccttcattgtctggggctgtcatgcacaggaggtgcaggtggatgaaagaggaagggggtatgcttgggtgcaagagacctaacctaaagataggggctggttttagtcttggctctgctgcaaacttgctacgtggttttaggtaagtcccttttcattgacagtcatatcttctctgcctacttctcaaagtgtgtgaaaatggatatgagaatattttctaagccatgccatgctacatattgctaggtgtcattgtccttaagctctgaatcacccttattaagaaaataagattctggaatgaagatggcatgggactccctcatccagagacacaggtcagcaggaatcctgaattcccagtcatcaccttcctgcatctgcccaggcccagctccatgaccaccaagcagtgacaagtgaaaacagcagagaggaataagccactgttcctcaactgatcaaagggcaagttaacacatgtttgaatgttatggctcacatggcctgccttaagccaggtggtctaggcaggtggtctttgtgaaatgaaggaccaagtggagagagaagactctccaagcccaagagagccatggtcttcagaaccagcaatttttgaccccagggaaggcatgagagccctcagaaaggttttacaaagtgacatccccagttgcctccttctgagatggtgataagtctcgtatatggcccaaacatggggattttaaaaaatccaagaaccccagctctaagcagcagaccaggaccatgtatgtgactggtgtccagaagaaagggaccccagggtaggtcactgaagatattatagggttactgggatttgtagacaggatgaacctgggtgcctgaggggatgaagaaggagtctgggagaggggactgcaggagcaggctggcaactgggtagaccaagaacaaagcctacaggccaccaggaggaaggtatccgagcatcactaccccttgaataaagactggaggctggggaaagccatacagggcagccctgaacaacccagagtatcaacatgatggcacagctgataaagcccgaaaagggctcttggcagggaaaagaggggcagaagctgaagactgactgtctgggtgttatagaaacaaacatccctgcagctagccagcaccagctgggtccctaggtactgtcttaagaatgccaggggtaccactactggtcccagcagcatgatcaaacctgcaggactcctattttctgctcaggcctacaaattggggctgggaatgaggatgcatgactttaactgggaatctgtgtaggttttccagaaggctctcagatcacctatgaccattctaactctggacattggcagggcctttacaactctaacagaagaacagaacagctctcgatgtgcctgtcttcccatttggtgtctctctgcaagttatggctggtgatcccaccagcactgccttaggctctcctcttgtcagacgcttgctgtcctctccttcctggctgcttcttcattcctccgccctctccaagtggggacttttttctttagtaaagaaaacctacatgtaaattccttcatgcctggaaacccaggggacattttgaacctttcaacagtttctgcacctttgtcagcttgagcagctgagatgagccactttataagcctgggggagttgagatgaaaaatttgcaggatttgaaagtggaaaaaatacatctaatttagctcttcttggaaaaagaggttttcggggcctgcttccatctcccttagggttgctggtcccagctctgggttccccctgcctcctcatcctgagctgctgaaagagaaggtgaggaacacaagggagtgtgtgtgtgtgtgtgtgtgtgtgtgtgtgtgtgtgaggcctcagtgctggaagccacattcaagggcaccaaggagccctctctgctctctcagtcccatcagctattggctggtgagagggaaaccacagcccagatagcctcctctcaagctccagggagaccggctgtgttcagggccaggggaggccagggtcattaacaccgcagccctgtaacatgagcttcataataggatttcccaacaggctacttcatttagaaacctctcgggcctcctctgctccccatggcggccctacccagcgacccccagagaggaatcagatgtaattggctgtctgtaattgactgtgacaccggcatgagcaacagcacagggagctggaaggatgcccctctgcagcatggactccaggatgctgggctctggaggcggcagaggatggcaagcgggagttctgggttccaaacccccttgtgctctgcataatgatcctttctgcctttgagacacagggctagaagcacccaaattccactagtgttgagcaaataatcctgagtcttccaggccaatgttagagctactgatcatgatttggcagcgtcccatgcatgagagctgccctaggtggattttgtttgaacttggtcatccatgacttaatatatatgtattatcaaagatgatgacagagacatcatatggttattactgaggtggggtgggtagtgggaacatcaccacgtcaggagtccaataggggccctaatgccatcgttttcttcaccaacgtcttcccatgaagacctctggggtctgaaactgctggagtgagtggtatggagatgctgagagactgcctcatttatccagagaggggtccgccaggagcatttctgggcaccagtctagagagccatggctagttaatgttagcactgggattagaactcaggtctagggaggccactatctgcctccacttctgagactggcttttgctaaaaataaccatcctttaaagcacaccatgtgttttcaggaatatcgaacttctgtcaactgtctctcacaaatgaccctctctcttgtgtttttataccttatttcttcttggggttctggtggctctgtggttacacatttctgcactgtccctctgcacaggactccatgtccactatcaccacctcctttttaatccctctaggggcagctccatctctccagagagctctgacatgttaagctgcttatgaaccagcagataatacacagcccctcagagggcaatctgaggctcaccagggaagaaaaggctctgaggctttgtgcttacaggaaagggcagagggaaggaagggagctgtggactgggggattgtgtttctcttatttgtatcaaggaccctgcatgggcctgtgagggctgtatcccagctcagtcagggctgttgtcagacttatcctttgcttttggtccccatctcttgctgtggctggacagtcccttcctgcagaatttgagcacaaacatctgcaccttttttttttttttttttttttttttttttttttttttttttgcatggacggagactcaccacttttcagtttgaaagatggagatgaaaaattatactgaatccaagcctgcctgcagtggagtcttttggttctgggcccttaggagccctgagagatctgagttctgtttccactgctttgggccattgatgagttgaattgatagggccttaagacctgggtctcaggtctccctcagtgcagtagggtgaagaagactggaaagagtaacttgagggctgttgcaaatggagaaggaatgcacctcaaacactggcaaaccacccaggaacaagccttattttgccaacaggtctttgacaggcatgttgagagaggtgcaaccttgcctttccctacaggctgtaaatgttcaggctaaacaaagagcttgagtgctagttacctggcaaggcagttgagcccccatttttgtttcaagggcctgttaataatactgagaaggcaaagtctggggagatgtggtttagtccagaagagtatggctgggtatgttttgggtcccagaagctatccataagacagagagtatctcatcttcctttgtacccacctagcctgctgcaggatgagtctgtgaagctgcaagtgtgttcgactcatcctcttgtgtatgtatgaccagggaggtcaggaagaaatgagcttagctacaataggcccctggagaggctggtgagaaggaggcgttgttgagagcctcaggaagcctcttgaaatcactgggcataaatttgggccagcaaggccaaacccagccctgatgaatcttttcattgaggataggacctagttcattagaaaggctgcagaatgaaataggcattttggtttctggcttttccctggcctctgtctggagtagactactcagcttcagggtctctacatcagcacaccacacattcctggtcagagctggagtcactgggtcttagggtatggtccttggaggcccactctgatcatttctttgcaggcctcagcagttatggccttctccttcctcattcaaattggattccactctttaggtcatgcgggttggatggtcccatgtcttttctttcttcagctacttattgggcaccaactggtactgggccctgtatgcttatatatgagattcagcatttttcttccaggaatatgctgcattcttagctcttagaaagtgttcacaatgtccagaggatgctgtggctgcaagtggtgctgttgctctggagaacctgatggagcatggccacatccggctagataaagcctcgaaggacagcgagtcaagcacaccccatgaccccactttgctcttccacagtggtcctcagcctaattttagacacttccagggatggaacaccgttacttccgaaggaagcctggttaatttctgaacctttcttccttggggtggaacttttatacaaatctccactcatgcaatttacctttttttgttgttactaaaaacattttgaacaggtaatatatgtgaaaggtcagtttccctccactctggttgtcatcagtctctctcattgtcagtttctaatattctcttgcagagagtcgatggatttgtacactcttcccccttgcataggggcacactacagaggactttgcacctagtttccccacatctcttctcagttaacactgaagtttaacagtagtttggttatattacatatagatctgcctcattctttccaatgagtgttattatttcattgcatggatatattttacttaattggtcatttatatacatttagattgttttctctcttttgctgtttctgaacaatgttgcaacagatatccttgtgcatcagtctttgcacctatatgtgagtatatctgtgagaaaaattaatttatttattcaatgaatacttattgaggattttctatatgccaagcacttttctaagcactaagaatgcagtaaattctcagaagtaaaattgctgaataagaatatataaatttttaattttggtagatattcccaaattgtcctccccaaaaaggcattttctaccaatttttgttcccaccagcagtgtttgagagttcctgttccctatacctttgccaagataataaaatatcaatcatttttatctttgccgatctgagaggtgaaaaatggcatcccattgttgttaccatttgcatttgactttgcaaagttccataaactgccctgttcaggaactgagactcaagcattccagtagaatgcattaagttgggtgtgtttgtgtgctgcaggtggttcgggtatggtctgtccttcactctcttctgtcccattccctccaaccctgcatcatcctctgtatgtactctttgcccatctctagtatcaggacattttgacacgtgcctcccaccgattttggcacttcccaagctgtggtaggtgaaatgtctgtagatgggacaggacaagtgcaggtgcttgacgctggaagaccaccccattctcacagtccagtctcaggaaggccgaatctgcctggtttgctaagaaacacactttgcttctcccatctgtctccttctgcccctgggcctgtgtcagggcttcctgccctgccgcatgcatctctcagctctcaccctttggcccttcaccccacatcctttcctttaattttcccagcttacctctggggcctctagcctcagctcaccatgttgacacctccatagccccgccttcctagatcgccagccctctgccctcccctcctcctgccccctcttcatttcttcagccttcaccagacctgccaccccttccccagcagccccaaatcagtctcatccccttccctgaccaggtgtctaccctctactggagcatacaccttccactctgctgaagcccaggtcttgtctctgccaggggtgttggctcagctctgggctgttgcttgctgcagctatgcatatgtctgtttggtttttgtccccctgctctgtggcagctctttctatctggggccatgcactccctacttctcttacttacctcagtttccctttcccctcccttcccctcctctcccttcttataccttctcttgctccttccttccttccttccttccttccttccttccttccttccttccttcttccttcttcttctgtacttttgttttaaagtgaaaatattcatgttaaaaagtgagttaatttaaagaaaaataatgaataataataatacatttaaaacctgccacatataagtatggcaaaaaggaataaagataataggcaaacagctgatatttgaaaagaatgctgatgctctgtttacctgggctaggagagcagcttatgcactcttcagtgtagccccacattccactgccactgatggttgtatgatggttataacctgggtatggagcacacttctggattggcttccatcttgtgtcgaaatgctaatacagtgtggctgtcatttataaagcagtgacggtgtgctagatgctctgccaaattctttttctgcattaactcttaaatcctcacagagctttatgaggtacatgtgattattagcctcatttttccattgaagataccgaggcaccgagaaggtaagtaattttctcaagatcatacaacacaggacttggaggttctgctggtaaccactattctctatgcctcccaagctaaagaagagccaagatttgtaatttttgatgggagttggcatcagcattccgtttggactaagatgtaagccttcactaacatgcacaaagaaaagtcatcagaatttgatctacatttggggacttcacggatagtgttcatttcccattggtaagggatgaaccaggaaattcatggagtgatcatattcaccagtgagagtgaactgaagtcactgtcactgcacctgtcacctgcatcatcatgcccagctcacattcccgttcctctactccctaagctcctcaggggcagtggccatgcctgatgcatctctgaatccctacttgctctgtgccatctgttaaatgaaaacagaacaaaacacactgaaaacaaaatttgtggaaggagaatatgagctgagaagggagagtctttgcattaggatgtataagaaaatatcccagcagcattgagtagagggacctccgaagaaactggggaggaatcgggcacaaggcatgcacttgtggaagtgatgatggcagaaccagatggaggcagtaaccagtgatggcagaggccttgtctgtctgttgtccaatatagtgacacattgtgcacaaacatacagaacaaaaacaacagaatggtcgcaagcccatacgttatgaaactcactaaaagttggtgataatgtctcagtttgacagaggacataaggtcagtgcaacgtgtgtatttcaagtgggaaatgacaatctgctctttgcacaagatggatagagcttctcattgaaattgtatggaatatgcaagaactctgccaaatcatgaacttggcaaaaatgtgcctgttctgggaattaggcgatttcagggcttccatttggtttctgggtctgtcacacacatgcccacatggatctgaatgtggaggcccttgtgacttcaggctttgctttgcttttctcactggctctgtttgtcttttccctctgcatctttggtcaaatttgtctactctattttctcttcttttcctccatttattccgttctcttgtctgtcttctctctagacttgtttcgaaaagagggaaaagaaacatacatttcattgatagaattttaatgagtgaatggctatttccattcattgtttttattttgtctctaggagtctgtcttgatgcgaattgcaattttaaaaatgaactcttttaatagtaaaatacaggaaatcaatgattatcattgaatcaatagcaaatattacaagtgattttgtcatcaaaatgattaataatcacacattttgataaaagatcattaattaaaaagaacagtagcttttaaaaattttaaactgtctttgtaggatgccttccttcttcagtctcattatttttctggagcattctttgcttccttcaccttcttcagccccattcttgattactcttggcttatgagaattatttcaagcctcccttttcttctaacatattttgaatctttcattccagatactcattaagaaccagtagccaaagctgttcattgttgaattttacatacctgatgagagtgactgcttccaccttgcaggatgacatgttccttcccctgctctacctaccctgcctatctctgcctacctaccctgcccacttctctaagagtttcctctagggccaggcgaggtggctcatgcctgtagtcccagcactttgagaggccatggtaggaggactgcttcagccccggagttcgaggctgaagtgagctatgatagtgccactgtactcctcccgcctgggtgacagagtgagaccctgtctctaaaaagaaagagaatttcctctaataaaaacaattattttggagagtgttttatctgtggagattgattttttcagtcattttctctctgacccacatcaaagggtcgactacccttctgcccgcttgtagagagagcctaaattcgagttaaccatgtctaagcagtgcagcagccctcccgcccccacctccaccttgaggaccttctgcagccctggaggctaccgattgactactcagagagctcatagcctcagtgcacaaatcacactgacttggacatccacacaaccacttctttgggaggcagaagtgcctgcatctgcgcatcccaggggttggtggccttgactctctgatctgcttccccagtggccaggcctcttcagatcttttcccatctcctgccttccctgcctgtagctgtgcactggcccttcctttcaggccacaaagagctctgtagacagaagctgtgtgctgtttgccaacactgcactgggtacacagaggggcaagggagaggccatctgctcgctcctttcacacagacctttgctttctccctttcactctcctccttctctctgtctttgaatgagaatacaaaaattttttaaaagcagttgctaattagagcaagagaatgagagtgagcctggaagagagacacaacagagaggccagcccccgtgcaaatcagctggcttttaagagccagtgaggaaagggacaaggagggggccttgaaggggcttgggaaggatattatgacaaaataagcaacaaagcttcttcagaatggcaaagagggctttgtcttaacctcctatcataaaaggggaggaaacaagaaatgacagagagtttcttgtgaactccctctgcaagcctccacctaccctggctcttcttgtcttttttactcactcaatagcccagtaaacaatagtctctatttagggacatttaagtgtatccttttattgataatttttgttctggctgatagagagtgagcaattggtggcttctcttcccaggcagggctggcttccccaggcagggagcttgcccatgcaggagcagctaagtcaccaggaagccccagcttggaaaatatgtcccgacaagtcaagactttctttcaggattttgcccccatcactctatcctattcttggttcacctagtgatttcttttcccatctgcattcctgccattctgtttgcccagagcaaccctgatgtacggtgctgaagtgcttgcccagtgcatggccaggggaatggcagtcagtgttagaacagggccccgctctggccctgagttctgaaaacccactcatgctcaagaaggttctggccaccacagcaaccagggatgggggcacctgcatggcagctgtgccatggcttagaatagagctgccttgtcctttattcaaccagcctcactctaaaggctgggaggtcccagaaagaccaactttggagagctgtgaggcagagggagggacacatggtgaaaagactcctctagagatgcattttcttcaggcatgagatgaatggactgatggcccagatatataaagacttttaagtaagtgctatgcacattgaaaaacttgggtcattttctgatttcatggagtgtaaaaaaatgaaaatggagtggtggaagcctcatcacaacacacattggtactaactagtcagggaggaagaaaggaaaaggaaatagaacctgggaagacacatgctatggtctgaatgtgtcccccaaaagttcatgggtttgaaacttggtcctcaatgcagcagtgttgagagataggacctttgctaggtgattggatcatgagagctctgcactcatgaatgaattaatccattcatggattaatgagttatcaagggagtgggttagctgttactagagtggatcttataatagttatattacaatggttgtattgttaccatttggccatctctcttgagtccctcaccatgtgatgccctgcaccacttcagggctctgcagagtccccaccagcaagaaggccctcaccagatgtagcaccttgaccttggaactcccagccttcagaactgtaagaaataaattgctttttctttattaattacctagtctcaggtttttagttataacaacagaaaatggactaagacaaaaggatgataattgatttatcctctttcactggtgactttttaaggtgatggatgcacatgagaagaatatcccactggagtctgttggaaaacatctgctcattctaagatgaggtctcaaagtggacttttcaggagtccacactcagtggacctgtctctaacacacaggtgtgtttccctgaaccctcagtgcagtctatcttggccctgtccaaggacctctctagaaaacaaggacatgagtccatttgccatgcaactagccagggtggaaaaagctgtagagaaaacagccatagaagtatagttttaagagctggcagcttgagttgttgaatcctggctctgtgtttattaatggagtgacttgtctgggcctcagtatgttaaatgatgacataacagcactgagctcatgtttgctgtgaagagtttatgagaatctgcatgtgtagagctgagcaaaagtcttgacaccttgcaaaggtttaaaaatggatgttgatgtcaacatttttattattaaacaagccaggaggtaattttctatctttgggtgaaccatatatgaattgtgggaagaatgtagaaaatttaaagagatccagtaaatatcaagaaggcttagacaacatgatctggttcatacgtatataaaatattttaaagtaaattccctgaagatagtggaaaccatccatctagtcataaatagctatgggtttgtccagtttattactgcaagattaaattggtttttgttagttaacattttttaatttttgtgacttcttaattctatttttaaaaattataatacagaaaatttgacttcttaacttatttaagtggacagttttatgaattttgatacatgcatagatttgtgtaaccactatcataattggggtaccaagagctcctttctgctacccctctatagtctcctgtttctccatcccccacccccagggcaaccagtgatttgtttttcatcatgatcctgttgtctttttaaatgaaatgatgtattatggcaaccttttgagactggcttctttcactcagcataatgcctgcgagattcatctcaattgtatcatgtagtaatagtttgttgcttttaattgctgagtagtatttcattgtatggatgtaccataatttgtgtatccattcgcttgttgaggagagtgtggattgtttccaatttttgattataaatagaggacatacattttcatttctctagggcaaatacccaggcaagctcttattgagtcatatggaaattgtatgtttaactgctagatcagttttcagggtgcctgtaccattttccattaccatcagcatcagtgtgagtttcagttgttctgcctttttggcagcacttggtattatcagtattttttatcttagccattctactatgtgtgtcatggtatctcatggtgatattaatttgcatttctctagtaaatcatgatgttgatgatctttcatgtgcttgtttgccatctgtttatgtttatcctcttttgtgaagtgtctcttctaggtttttgcccaagtttcaattaggttgtttgttgtctttcttgaaagaaaggaaaagaaggggaaggaagggaaaaggacaggtgaggagaggctgcctcttctcttagaggagccctgggaggcaggtgtggccatgaggactggtccacacaggggagagccaattcttagacacgctagtttctgtttctgatctgtgatgaaggccttcatttaaggaagacatctcagccagctctgcttgggcttcttttctgtgaattattataagtgttaatgggagtcttcatcaaagcatcatttaagaaatattacaagttaagttcctctcaccctcacaggtctgatgactaaaaatcagacttgaaatcaaatttttatcctctttaattggtgacgttttaaggtgttggatgcacatgagaagaatatcccactggagtctgctggaaaaaatctgctcattctgagatgaggtcttaaagtggacttttcaggagtccacactcagtggacctgtctctaacacacaggtatgtttccctgaaccctcagtgcagtctatcttggccctgtccaaggacctctctagaaagaaagggcatgattttgattttaaaaatcaaaacttgaaagttttgagagttccttatatattttggatataagtccttttgtcgaatatgtgatttgcaaatattttctttcagtctgtaactgatctctttattctcttaataatgtctttcacaaagcaaacattttaaagtttgatgaagtccagttaatccatatgttcaagtttatctaaccaattatttttcacttcagccaggtcaagttcaataattctttgcctaaccttggcacaaagattttcttctctgctgtcttctaaagttttatgttttacacttaggtctataatcaatttgagttaatttttgtttaaggcatgcagctcattttatcatcattttgcctgtgatgtccaattatttcaacatggagagagctgtatgagtggctctttcactttttccaagcctttacttgaatattatgttctcaggaaccctaccctgtccactgctcccagtgtgaatcaccttcaacagcctcccatctccctccatggctttgtcttacttcatggcacttattatagtgtgagctttactgatttatgatgtgtattgtctgtctctcctcactagtatgtaggctatatgaggacagcggtatttgagtgtgtatgtgtgtgtgtatgtagggaaaggatctgcttgttaactgatgtatcctgagtgattagcacgtatttgaagaatgaagaggctggagtcccctaggccacacggctgcagaggtccacagtgcagggacagttgctggggctccaaggccagcagcagctatcagatgcgagctggactctgtctcacacgttcatcaggcaaaacaggtttgtcacagttaatgctccgaagctcttctctcactcacccgcctaccatattgaatgaggctaataagaacataagcaattaaaccattttccccatcagtcttaaattatttgttccttgaaatataagctttatccttttctcaccccgatacctcttgaaagaaaggaagtgctctaatgccctgggaaaataatcttaaattctaatcagccctcaatcctgggtgttagaagtgactcatagatgaggtggtgggcaggatggaggggaaagctgtttaggaggcaaagtcggctagaatggaagctttcaactgactaacagtgcttcaactccaacaatgaggcttaacttatcaagtgtggggcccagggaatctgagatgcaagcagcacaaagatacagagagaccagaagaaaataaagcagattaaataaactgggagtgggtttagtggattcttgttctctgcaaatggagctcctcctcttcattctgaccctaccctgagttccaacttactttcctcaccagtggcatcattctgcccttggtctttccagtagcaggtagagtcgatgcgtgacattcagtctccctgggttctgctctggaatttataggaggagcttagggacaacagtctggatggatgggtggatggagcgagggcagctgggctgcatttgcacagcaagcacactgttcttaatgtgaatgtttatttgtagtgcagggagcactgatgggaataggatgagaggcaggccctggctggtgagggctggtgtgaagcatctgcagaggttgctggtccttctccttcctcaatgcagggacactagtccctttaggtaccatcccatctcccaccccagcatgatgccctgcagatgcagcagatcctgtcaaacagccctgctctttgattatctctgaacagctaaggctcctggcctgtttgaaattgggtcacatactgtttgttctcagaaaagcaaactcatgttgtcttctatttccatctcatttccagcactggattgaccaagtgggctaaaattcttttttgataaatttgtttcagttcaatgggaggagctgctgatttttagtcatcagacctgtgagggtgagaggaacttaacttgtaatatttcttaaatggtattttaatgaagactcccattaacacttataataattcacagaaaagaagcccaagcagagctggctgagatgtcttccttaagtgaaggtcctcatcacagatcagaaacagaaagtagcatgtctgagaattgcctctcccctgtgtgggccagtcctcatggccacacctgcctcccagggctcctctaagagaagaggcagcctctcctcacctgtccttttcccttccttccccttcttttccttctccttcagagcatccttgctatgagtcaatgctgcatgtggggcttcttaactgtacagagagcatctggatcttgaggtctttctctaagagtgtgtgtgtatatatataaatatctatatcatacgtgtttatatataaaatatttatatataaatatataagtatattatatatcttttatataacatataaaagaggtaatatatattatatgtattataaatatctaatatatattaaatatatactatacattatatatttattataaatatatattattatatatttattataaatatatattattatatattataaatatattatatattaaatatatataatgtatattaaagaggtaatgtcaaaacagggttacaaaaattgccgtaatatttgcattcaacaaacaagtacttttaacacaaaaattgcaatactgtgtgttatgctacaagaagagacttgacagatttataaaatgtatacatgcacagggaccaagaggcaggctggttggacaatgggacacaatttgaagttgtggatggacttctcatttcagtcctgtgagtgtatttcactcagtgtgaatttgaggcctttcttgaatgggagcaggccaaatggccgtcctgccttgctgtgacaaccctatttggacctagagtctgggtgggtgggcagctctgacagagttatgtcccttgtgttcctgcacatcccaggttgggcctcagctgcccatctctggcccaggggggttggtctggcttcccttcttgctccctccacagcctggataggtgttccagcaataaggcattggagtctgattcagatcatagataaatctggcacagttacttacctttcttgggtgtggggaatgtgtcctcctgcaggagctccagctgtggcacaccctgtagtctcaggtgtgcagccctttccaagggcagacacacaacaacaggattgctttctctggctgtgttcactggctcccttgccttcttcagggatggggacagtgagaacctgatagtgaagggcagggttgaccaacaaggtccacagcaagtttctggctcagcctggaagagatgcccctgcttctttaaccaatggtaggtctggcagtgggagaggaaccgagcagaagcactccttgtctgtcttctagtctttttttttttttttttttttttgagatagagtctcactcccgttgctcaggctggagtgcagtggcatgatcttggctcactgcaacctccacctcctgggttcaagcgattctccttcctcagcctcctgagtagccgggattacaggcatgcaccaccatgcccagctaatttttgtatttttggtagagacagggtttcaccatgttggccaggctagtctcgaactcctgacctcaggtaatccacttgccttggcctcccaaagtgctaggattacaggcgtgagccactgcatctggcttgtcttctagtcttaaaaaataaattatctgagcagaattaaaatgccaagggttggtaggagtgggatagggtagggcttgtcaaaaagccttgggagaaagcatttccggaatactcaatcctagagaaaatctctgcagctgcaggattcaaggcttggcctggagagtataccttattcctttagggaaatgctgagaggttttgtctgacctggaaaaacaagaggagcatgtctgcaggagagaggacccaaaggccagcaggaagttggtgatttggctggaaggcaagtcttcagagagtgctgtgaagtgatatagagctgcatatgggctggaggaatatcccatttctctgcctttatcctttatccagtcacagtggtctctgaccacaccctagttcatctcctctccccagatacatcttcctaaatccaagactcagtcacaggtaagcattcaaggatgcacgcgtgcgcacacatacatacacacacatgcgcacaaacacacacacatacacacacgggccccaaacccagtttgtttaagagtgtagactctggagccagactgcctgggttggaactctggtgctaccacttactagctgtatgaccttggggtaagttactttacctttctgtgcgttgctttcctcgttgtaaaatgggattgatagtaatctatttcctagggtgttatgggaattgagtgaattaatgcttgtaaagtgcctaaaacactgctggccctcagagaacattcagtatgtattagctgttattattttccaccttgcatgcatagcgtgctgtgtccccacccctgccccacctcttcaacgccaacagtttaaattgtgaatctcatcaacccttcttcaagccttgcctaaactctacctcttgtgtgaagagtttttgatttcctgctccagtgccagctgacatcctaatggcctcttgttggcacctgcctcagcatattgcctgtttctttcctctttgcccttttgtttcccaagtccttgagtcagactgtgagctccccaaagcagtccgcagtcccatgacttcatctctgatccgtggcagcattttcctgtttccagcacgggaggggctctcagcacacccttcctgcttgagctgctcctgtgccttgcacctccctgcccttcttccttctctgctctcctctcccctccctgccactgcccatcctctctgtgtctcttttttcctcccctctctccatctcttcccttttgattctccttgcttctctgacctcccccacctctctcttaatgagaactttcacacatcatattgatttggagtttcaaaaagccggcattgatttttctgggagacttttcatgatcttatttttaaatgtaggaagaaggctgtttccaaagctgttgactttgttctattgagttagggagtcgatgttggaaacttttatggggactcagagagctcagggacctgagatgccatatctaatgagctgggatcagggttgccatcccttttgcaggcctgagtttggtggcagagagccttgggcagggcaggggatgcagaactggggtggatttctgggtaaggctaaagagcatgtacagagagtgagcaaagtcaaaacagaaatactataggctgtaagagagtgaagggtaggcttagggggaagaatagtggtgggaatttgctgtggggggccacagctcctgacactctgctactctggcatcagagacagcctcccaggactgtctcccctagcccctcatgcaacacatactgacccaacacccagcaccaatgtactgcctggtcctgtactgagggctttgcttacatgatctcatttaatcttaccaataacttcaggaggcaggtcacattatttacatctcactttatggataaggagtcattataggcataggttaaagttagtgaagaacagtgttttttttttaaactattcgtaaggatagaataatagaaagatttaagagggcagggggggagtgagaaagacaacatcttgcctcctaaagggcatgtgcagatgcatacatgtgcacacatattggccacattaaatcttctggagatgaggccagacatataaaaacaaacaaacagaatcaagccactagatgaggatataggatgaaagggaaataaagacagagaaataagatgatatgtggctgaaggtcctgacacccataaccagaagtgggtggattaacagaatgcagaatggaacaggcacctggagggagtctgccttggcctgggtcctggatggggtatttcaggccctctgtacgggttagttagttgtcaccaggtcagatccacacacacacccctgctcttgccaggttctgcagccattaactgggactgccgttcccctacatgaattcagagatctatgggagcagctagggaggagcaggcacagatgtcatctgagagattccagggcaagagcagagaggaggcgccaaggacaggatgggatgaatgcaacagctcctttgcactgcagcctggcagccccctggcaaatgcaggagaacagctcctcacctgactcaataaaggcagcactgggcagggtcaattcaccaggaagttgaaaggtgatcaaaccacactgagatgacaggaaacctttggcctgcttgctaactttctaatatcatcaaagataaatctaattttgtcgcaggacagtttgtcttgtttggtttgaaacattcttgctctcctttttatctagcgagcttctctggtgttgcatctcagcttagggttcactttctccagacgtcaccccatctcctcctctatgcatctgtaacacccatcatggcccaaacatttcttctgtgatgccacatattcttccataaacaaccttatatgcaaaactgcactccaaatagcagtgcttatggggttaaaaaaaaaggttagggcttgtccttcaacacctgcaggagtttgtatcaaaagccctaagaaaaacaaccatcctaatagaaacagcagctcagataaatctcttgcacccagcctcccagtaggtggagactttgtggccttgaactctggggctctgccttctccttggaaatgtaggtgctagagggcattcatttctatttgaaacccagttcatcaacattacaactctgacaatttttatttgacaattttacttcaataaagctgaggaacaattctgaaatttccttgaggatgttttcacacaggaggaatgtctttgtagcttctccatctgcattttcaccttcacagcttagcagaatggtggagtagaggtgcttgaagcctccaaaccacccacaatgtacactagaggaggcacttgtgcagactttcagcttgtgcttcacactcctcaaggcaccgccactgttgcgagtggcctgggatgtgaaggagaatgccttggaaaatctctagctccaggcctgtggcctttcagcaaggtgtgctctgggaggggtggatggacctgcagaaaatccatcttcacgaagaatggactcctgcatcctgcattcctttaattctcactctagagcccatgccgtggcagactcccccgcaaatacctgttccttcatttacatgccttcatttcaagaaaaatagtaaagaccaagaatgtatctggcagactttccttcagtggccaggacatccttgtttgtccctttttctccacatcccctgcctccatttctcctgccatgctgaccacattcagtcttctccagggccaaggctcacctgggccccctgacttgctcctggtgaagtacctgctttggttttccatctgtgtgtagagggtgctcctttgttttctgcgactttccctcaacatcctcccctctgccttctcagcttcttctccagccccctccatcattgggaggatggatttgtctattcccctaaaacacctagagcccacagtttgctccacagagggataggagtagaggcctgaccccaggagatgttggaaaccaccttaagccctgtaacagagctggcaccagagcctcctgccgtcccagccctggttctacctgtgaaggagagaatggaaggaggcacttgcctgatgccatccattctgtttttctttccacagtgtccaggcctttttggaggatccttagacagcaggattgacattggaggagcctggtatttctgccacactcacacagcctcctctgcatccaccccctctgaggaagcaggtgacttgcttgtggagcctcaaaaatggaagatccaagttttccctttctcccctcagaagccctccactcctgcaatccactgagttacaagtcctatccattccactgtggaagagctcaaccttccctttctctctgctgcccctaccctaagccactgtagttgggctctctcttgtcttccgggatcctgccctggcccctcagtgcatcttccacatggttgctccagggattttcccaaaaagtaaagctggtcctgtcgacctatgggaggctcttctttagatgtcttcattactcccataaaaaagtctgaaaaccctgccttagcaccagggcatttagcaatctgcccccacccctcctctctagctccatctcctgcagccccactttaagtatctggccactcggtgctaaggggttcccagaactgagtctggtctttcatgctccaatgtcacctacacactctttcctcttcctggatttcccttctctttcctttcagttggcacaactccaggtctgctgaaacagttcagccttactaagccttccctgtctgtagtaggccttgcttcagtgtccccagtgctttttagcatctgactccagtgtcattggttgcactagacaggcagagtgctcttgcctggtcctcccatgagactgtgagctgtggcaggacagcctccaggttgctcctgtggctctggcacctagcatggtggagctattaggagaaactcaccgcagatgtgtggaatgaataagagagcattgtgggacctacccagtaacctgagaggtggcaacactactgccatctggcttcagaggagtaaaataggaccagctttcttgggttttctcctccatgatgttgtcctcatggagggtggggccaggggccttggggtctggcatcccaaaaccaggcaaacacttaggatttctggcctcataatgtggcttataaaagcttccaaggaaacaaaatcaaaatgttagaggatttttctttggggaaataattactctcatcttatatttagaatggtacagtgtcttctactttgtgatttgactgacagagaagtgtatttgaactatttttaacttggaatattaagaagaagaaatcaagtgattagatctttggaagctattgtataattcttaaactttggtaaaggagcatgttcaaagggggaaaaaaaggccaaccagattggcacgtttcagttctttctgtaactttagacttttattccaaaggaatccattgtctttagaaaggcagccaaggatgtgcctgtgtatgtttgtgtaaaagtcactccattctccataaatagcttcagattatggtcttcacttcaagaagacattttagaaagggcttctctcactccattgacagcaacagtgagcgtttgtacagggctaagcaagttacactttcccatttgctttttaaacaatcttataagggagttactacagatggcccccaacttacaatggttcaacttatgatttttcaactttataatggtgcaaaagtaatatgtatttgtgtagaaaccatatagattaaactatgatgttaggtgtattaaatgcattttcagcttataatgggttgatcaggagcaacccattgtaagtcgaggagcatctgtagtctgttgatgattttctttgttttgtagagggaaaaaaatggaaacaagagtgcttgaatgaccaacccaagaccatctagtcagtatatggttgtaggtggtatttgtgtctagaccctctctcccttaatcagttttttttgttgttgttgttactttgcggcccaaatgcaaaagtcatttgggttatcccacattgcactgctggagaccttaactggaaagattgtgtttttattaccaattgctgcatagcaaaacacctcaatggtagtttttgacagggcatgacaggaatgagttatttctgcttcattatatctggggcctcagctgcaaaatttgaatggctgggagatggaatcatccagagacttatcacatgcatggtacctggactgagatgaccagaaggcagaactcatctgagactgttgactggaactctcagatatgccctctgcatgtgacttgagcttcctcatagcatggtggtctcggtgcaattggatttcttatgtggtgcttcaggattctaaaggagactgttccagtgaagaaggaaaaagctttatggcttttatgactcagtctcagaaatcacatatgatcacttctgccatacccgattggttgaagaagtcacaagcccagccagattcaagaggaagagatagatgccacttcctaatgggaagggtgtcaagaatttgaagcctttacttacactcacaagaaactgtttctcttctgactagattgcccaatgtacagtgctatctagaagaaagtaaacgagcaagataatctctagagatctagagagaattgctagcaatgggctctagatttctccatccacatgagaagagaggcctgacagattgttccatttagttctccctggcataccaggtcagagaagaggtgactcttgccatcctttgctgaggataaatactcaaggcatgtgtgtcttcatgtaagatgagttacctggcaccaggctaggctaggggcttaagtattatatggcttgaggattccctgcctgctgctcgtaagtcataacattgtatcaccttggagggacaatatttcctctgccacaatccttcagaataaaggtactaggaacctttgtgagtgaggagaagccaaagaaacagattcctgggaattcaaggtactttatccatgagctcaacaggttcctctccttcaagccttaatcaagggatataagcacagggcaagcagggtatcagaccttacaggatcatctttgttgtaccaaaccattgctaacacactggggtctcctgaaacacagattcactatctgctttattcttggtagtcaaaggtagccccaaataaccttttatatctcatttcccacatggtgctcctcttaccagcactctgaccatgctagatttttgtcattagatcatcatgattaactgtacctgcactggtcagcgggggctaggttgtgttgcaataacaaaaactccccaactcttaatgccttaaaacagcacaaatttacctcttcctcatcttgcgtgttcatcaagggtaggcaggtatctgttccatgtcactggtagtcatttggcagaaggaaagggagcactagagggtcttggattggcattaaatggcctggttcagaagtgacacatattacttctatttacaactcactttccagagctaaaattatggtctaatcccacctcaaaatggccaggaagtacagttttaccatatactggaacacagctagaaaaaaatggcaaattgcattgagtaccacatgacaaccacatgctgtcattctttttttcttcttcacatttttatttctgcatccatgcctgcgtgcatctgtgcacccacccacccacttatcaaatgtttagtgagtacccaccctgtgcccaggtatggcttttaggtgccaagcatatggagatagaaatgttctttggagaagttaataattttgctgaagttgttcaaaatctgtccaatttttccaggctatagctggactctccatgaagacagccagtattaatggattcttccttgacaacaagtccttgatggtggagcataataattattaatatttagttattattgagcccttacaataagccagataattttctaagtctaatttaacccacactacagctttgagtggtaggctatattatgccatttacaaatgagtaagtttaacttcacaggggttaagttgctcgttcaatatcatacagctacaaggtggcagaattgagatttaaatttggactttctgagtccaagtccttactcttcaatggctacattacacttatctttaatgctcacgcaatttttttctctaaatcgtagacctggaaacaacaaacagacaaagattatcctctgcagttgtactgtgagggcttagaagatagaaatcatccagtgatttctgatcattggattcctttttgatgaatgaataaaggagggagagaaagagagggaaagaagaaagggagaatagagaaaagcaaagaaggaaaaagaaggaggagtgaaggaggaggagagaggagctgattcttttcacatggaatgcaaatcttgccagtgaggtggtgtgttcctgcgtgagaaggcaggcaaatgcttgtatcctgaggaaaggtgttctgcaaatcgttggcatcactctcataacctgatcatcagctctgtccctcagtctaccagttctgtgcctcagcacgtctcattacgctgaagaggttcttcagtctaccacgtctgaaccaactacaattaaacacacagatgtattcctcctcactcggctgctaaaaaggaaatatttttgaaaaatatgacaagtcagtatcacagctcgaagaaactggaggaaggaagaaagggctacaaagaaggcattaaacagagcttttaaaggtcactctctgattttgtgtgttactttccaaagagatattttcagattaaaaaaaaaaaactgtgaatatagcaattatggctagcctctggcctgtgcagttaaataatggtttacatcggggatcaacaacagtcagtgaggcctgaaagcactggctttttctgcagcctgaccctgcatgcccaggtccaatttgttttccacgattactctgtccttatcaaaagaacaatctgcaatcccatgctgttcttatctggtgccggagccttagactgtgtcctatatatcgatataaggcttggagtaacctagattcatgtaataatgcagcttctaaacgttttaataaagaggcctcccttagtgactttcagtctccagcctcacaggtcaaattgctttgtctgtgttcactccttcattggcgagtgtgtgtgtacccctgaatatgcatgtgtgtgtatgtctatgtgtgcatgatcatgcatatgctagtgactactgtgttggcaactttcatcctggagataatgtgtaagtgcttaattgcatttgctatttagcaattaaccacttgcaggtgcaactagttgtgagcacagttctgcatgtgtgactaattacaggtgtaaaatattcacctcttcagttctcatcatggctcagtggggctcaatgctaattctctcttgccatctgggttcagactcatccgctggccagaggatctcctcaggagaggggtcatgttggggaggcagaggtgctgttttagagcaagaagggaaatggaagtgaaggagagcaggacagagtgcctgagagactgcagggagtcagaagcttagctatgagcatcttccccaccatgctgcctgtgcaaagcagaggactagctgtgttcttggacctccatatcaggacctggcatctccttggttggagccccctgtgaggggtgctggctttctgaaggatctgcagaaggcatctgtctctctccttagaccctttgcataggcagtgacccaaaacctcatagacaggtggttgatggaagtctggacaagtttttagaaagtgtttactctctcagcagtattgccaccatgctgtgtgatggctgcatctttggtccccgcaattcatctgcaaagtaggggtgacaccctcctccaccttcctagtggaactccagggtacctcaagggttaggtgaatgtggacttgcctagtgaagatcaaatgctctgtcctgcaagggatcagggtaactcttgggtggtcatagggagtttctcacttgtaatattttcacagtaaaagtcactaaaggggtaaagaggatgaagaagtaggaactagagtagaacccctgaccctgagtttcattcactgtgtctgtgcctctttgcattgccagtggaaagcagaggtctgagaacagctttttgatgatcctcttctgggtgaggatcatcctcttggtggccccacagctgtgggctccactgcagctcggccgtcttccctcaccactgatcccaccacccatgtgaacagtgaccctgagagtagccatctgagagcccctctccacagcttgaagtctggatgggatggggcttcagagaagggagaagtgggagaaggcagtgtccaaaggaagaataaaagccaggatgtggctgggacaacatcagaacaaacagaatatttaaaactcttcaagaagcctttctggaagatctgggataggggaatcagctactcttctaggccctagagagggaagggccctcacctgggccccagagagggaagggccctcacctgggccccagagagggaagggccctcacctgggccccagagagggaagggccctcatttgggacccaaggaggtcagagctcccagcctaggaacttgcactgagccatccttgccacattagagggatcacagcagatccaggtatgtgcctccagtgtgtgtgtggtcaggggagtaatggggggaaagccttgaagaggcctagcgaactgagtgcgggggctaggggcgagccagagaggagggtgtgaggatgtggcctgaggcaaagggagagatgaggtagcagaggtagagtagttatgtcacagtccacttcatggctggagttagagagcttggtggcatcaaaaaaagagctgtggatgagtgggagaagctgggccagtgtggaccagcaccctgatgtaaggttttccgttgagtactttttattgcacaatggaacttggcttaccagttcctgactcttggtttctgactctggaccactttcagtagactaccctacaagagttggcttgttccctgggacctctggtgtgttttgttttgttttttgagttggagtctggctctgttgcccaggctggagtccatggtgcgatctcagctcactgcaacctccacctcctggtttcaagcaattctcctgcctcagcctcccgagtagagtagctgggactacaggtgcgcaccaccacacccggctaatttttgtatttttagtagagacagggtttcaccatgttgcctaggctggttggaactcctgacctcgagtgatctgcccacctcagcctcccaaagtgctgggattacaggcgtgagccaccatgcccggccggtgggctttaatggagtgcagcagagcaattaaagatggttttctcttggaatcattgtgaactggtcctttatactttatttcaccagagattcaaaagcaagaaggacgtttctgtatctactctaccactggctacttgtgcctcagtttcctctctctaaaatgagatcataatagaacctatttcctagggctgttgtgaggactaaatgagatgagtaacatgcccagcacattcgatggacagagaaaaccctcactaaatattagctactcaagttactcctgttttgttcttttagttcactgaggctcctttcttccaaaaacatctgcctccacctagattgatttgagaggtggtgtcagtgttatctgttggctttagatagcagaagcccataattctgagatcagtacagtttaagcctgaatcactggcttattcataatagcaaatgactttggagcctgctgggaaaaccctggtcaggagtcacacatgcagaattccagccaagcagaaaacatgtttgccccagatagtgactgtcagacacagatttcactcccaataacttgggaatgaaacacaaataaggaagtctgcatttcacatgtcttcttagattacaaattcaggcttagcacattaggtcaggatgtgatagctcagatgccagctcttcagctttattccacaagcaccgggagtgactcttttccagatgattacagaatgtgagtgctggaagaatccctcatgattattccatgaaaccaaatttttcacttgagaaaagtggtgacagggtattcagtgaatttatcaagggtgggccaagtaggggtgctttgtctctgagatggttccttttaagtcattcctgtcaaatgcagcgtggcatagacaaggctttcttaattgccattcctcacaaatgagcatgtgcattgacatatgtcttgtctgtgtgcgtggcatggaccatcccagccaacatgcggctgattccagatgttagcttgaggggccaactcaggttcagcatcagccaaagcacttggaaatacctaagtgatgtcatgatcccatttacgcatctggaggatggaggcctggaacataaaactcttattttccagtccatattggaccttagtctagcctgtgttcttcagactttgcggccaaaaatgttctctaaaatgtcaggttactattataaacttttgatttaaagatattaacacacacacacacacacacacacacacacacatcccaaacaaaaacaagagacctattttccatcactggtgcatcattcattaaaggaaggtcagcttaacaccaacaaaaaattttgtaattgtaatctcagaatttaaacatttaaggattcaatatttatgaaaattattgcaaaaattcaatctttgtgaaaatctcaccacattgcatttagcccttttgtgttaatagagtcttctcacctctgtcagatctgagtatgaaaacaactggactaacctgaatttattaatagaatgaagggcatccctttcttaccttacacaacccatcaagatacttacacagagggaactttgaccatgaaatactgggcactcactattcctcaaatgttagcctatcatgcctaaataatagtaataacagtaacaacaacaacaataataataataattactaacatttattaagcatataatacgtacaggcattgtcttaagtatattgcgtgcgttaatttatctaatcatcacagctgtcatggactgaattacgtccccttaaaattcctgtgttgggccctaaagccctgtagggcctaaggctctaatgtcctctgatggcatttggttataaaacctttaaggagataattaaggttaaatgagatcataaaggtgggactttaatccagtgtctttataaaaagaagcaccagagtgctgtttctgtacatgcacacagaaaagaccatgtgaggccaggcacagtggctcacacctgtaatcccagcactttgggaggctgaggctggcggatcacgaggtcaggagatcgagaccatcctggctaacacggtgaaacctcgtctctactaaaaatgcaaaaaataataataataatcagctaggtgtggtggcacgcgcttgtagtcccagttactctggaggctgaggcaggagaaccgcttgaacccgggaagcgcagattgcagtgagccgagatcacgccattgtattccagcctgggtgacagtgcaagactctgtcttgaaaaacaaacaaacaaacaaacaaaccatgtgaggacatagcaagaaggtggcatctgcaaaccaaggacggaggcttcaccagaaaacagccctgctgataccttgatcttggacgcccagcctccagaactgtaagaaaatgaattatgtttaagctacccagactggtattttttttaatggcagcctaagcagactatacaacagccctatgggtatatacttttatcagctccattttgctaaagaggaccttgaatctcagagttgtgactagcatgaacaaggtcaaatagaaatcatggagcttggccttgtttaattctcagttggcatccattaagaagcaggccttatgttgagatgggaggaaggcccaagtccttgatctcctgtctgagccagtagctctgtccttctgagccactgtacaagactctgttgtggaataactgccaggccagaggggctgttattacaaaaaggaaagactagaaagtcctgaactcagggctgggcacaaaggagggagctcaagaaatgtgaatggaatctgctgaacaaattaatgagcagtattgtcattggcattcctttgtcttcaacttcatgtgtgcagtcacagtcctaagcagactatatattttttttcaaaaaagagcagttagcctaatcaaatgagtaaacataagcagaactaatgactgttgggttctataaattgtgtcttgaaatgctaacggccctaataagagcatccacagtaaatgaatgcaccattaggctgaaaacaggatcatcaataccagaatatgcccactcctcctccttccccatttattagagttggctgcccatgagagatacatggtacaagtattcaggtaaccctatcatgcggtttttacttgtattactcacagtgatttgtatgtatagtaatccttccccaaccacagattctctttttatgaaattctggtatccttgaatttatttctgtatacttggagaatttctgttctaggatattcaggtttttgagtcactgctgttgggtataatttagaaatagagaaactggtgggtggtaggagaaaagagtagaaggcagaacaggagatgtttcacaatgcagccttggcagaagacctgggagtgccttctcctgttcacgtctgctctgggaagggaattgagatgtgctgacctaagctcagaactctaggccagggactgaagagctctgctgtctatcatgctctatttttaagggagctaagaattggacccctacagagctcttttgagtaagttaaataaagattcctgcaagtgtttcaaacttcccgcttactgtgtctctggcaccacggtggaagtggtgaagcaggatcacaggtgacataaatcagaaaggctctgaatatttgattggaggacaagatagggaggaaagtgaatttactgcaccagagggggaacattacaaatgccttattgaaactgtggagagggagattctgaagatttttgtattcaaggctagcaaatgggaattaactaacatggaaatcattattactataacttatacaaaacgctgttgatattctacttatgtgtgtgtgatgtttttatattagaaaagactttgcttttattaaagttacacatttctattgacatttcaatacacacgcctgcacacgcacgcgcgcgtgcacacacacacacacacacacacatatatgtgaatgactcaaaataatccagaaactactattgttaaatttaggtcaacatcactttagagctgtatctataagctatcttcactgtaactagaaagatggatggcaagtcaaaactaattttagaaagatgtgatcacggtaatctttaacacattaatttaattgtgttaaatgtaaaggaagaaaaataaatgaatataaatggaaggaattgctacatttgataaatgcttcttcaccacaagatatactctttcctggaagattattttaagattaagaaataattttatagaaacaatgagatttaaatcactattttaaaagtcacacttcgattttaaatagtaccaattaaccccttgctatgaaagatgaggaagttggtatacttgactatttctaatatttcttcacctttccccacctcccaatttttactacttttaatttctttttttattttaaggtttataacttgttttggttttatttatgtatttaaaagaatgtaacaattcttggttgctttatcacaatttctccttaccaaattcattaatttatctcttagttgattgaattttgttatcaaaaaactttcccctctagaaggactctctcccttccctgagattctagtacattcaggagaacctcagcctatgaatatagctatagagaagtctgaagctaacctatgttttcttttgaggtgatttatttattctatttgctggctgaataattctttctttatctttgaaattcaacaatttcaccaggctatgcctttgcccctgctgattcttccttcattttaagaaatttttttattataagctctctgaatatcttttttgtttgtttgttagtttttgtttttggatagagcctctaacttagggatgctagtaatcctccatatactattgtgagccgtttctttgttcagaacttattttccatgtattttctccatgttaatagttcagttttaaactctatcaattatttagccatttcttttttatttactagttttatctgtcagtatctgcagagatctgtcagtatctgcagagaatttgtaccaggactcctggggatactggggatctaagtcccttagacaaaatggtataatctgtgctcattctcctgtatattttaaattatctctagattacttgtggtacctactacactgtaaataacttatactgtattatttttattgttgcatttaaaaaatgtttttgatccatggtatgttgaatctgcacatgtggaaaccatgaaaacagagggccaactgtattgttactttgatccacaatttgtttcctgaactcggcaatctcccttttatatattattccattatatttggcttttgagcttttgtattattgaattcttttggaagttaaatccttacggataactttcttctatttcttggggtacatttttttccacgtggagctctttttctgtctttttcatgctatgctgctatatttctttcttgttttttctaaggcaattgagaatgaatttgcatatttgccctgccgtttcttttcatttgtgctcacatttaagggcagctctgtacagacctcttgtttgctctaatgtgggctgggtaattcctccttgactctgcccactttgtctgaggttcatttgtctttatacccaagccacagtttaattgcctggatatgtctcctatctccctttctgtaactgtggaggagggctggaaagtacagatgcatcggtgtacaggctttgatgcactatcactgtcttctctctctcttagactttgttaaatactcgcaaccagggctggtcttccttggtttgaggtagtggtggggtaaagccttggtattcaaattgttttcctgcctcagagtggagatctgcagtttatgtttccatacgggcatcagccctgaaaagaaaaatatttttaaaaataccctctcagcatgctcctttccagccctccagataaaggggtctagaggaatttctcagaactctagctcactagtgctgctgccactggctccatggacctcaccccttgccccagtgcaaacactctcccctggctgagcacccctactgagggcctgctctttgttccttgcctgccccacattttctttcaacttgaggcctttccaatattgatccctctgcctggattgcacctccctttcttccctcctcattccctaagtcagtctcacctgacccgtcatgtccccagggagtcttgctgacccctccaatgagacagagtccctgttatttgcatgcacagctctctgctccccatggtaagtattttgctgcttctccaggttgtggtgtgtggttacacttttccaggacttccctttgatgggtaaatctagaagcaggcccatttctagggctgcttatttccataatccttctctacctgcgactccctcagcccccacttttttttagctgcattttagaaactttaagcttaggtcacctgtgaggaaaaattggctttccttttttagttttttaaaggtcacactctcaatgagcttaatgttgggaccaaaaagacaacacggggggccagggaagactgtgatttatggtgctgggacactagcccagcactcagggggtgatccagggagcaggcgggctgctcttggagaagatgacggcctggagtctgttttcagggccctgctctgtaggagtctctcatttcaagccataggctgtggggccttggctttgcctctgagagagccaaccacgcacagctctctgtgcgcaaaggacacatgctggtcccaggacgacattgccaagcctccggtcagtatggcaaaggcaagtttgtttcagttcttgtttcctgagaaaaagaggttgaagcaagacaaccatgccacaaatactgagtgagcatctgctacgtgtcaggccctgtcctaagcattttgagcacaagtacaaggtgatccctgcacagcggaagggtctttcctagtgctttggcttccaaggtaaatggcctcaaaatccctggggctcacagccttcaagtgcctgcctaaagggaacagagtgtgtagagtctgaaaggggaggagacggggagccttgttgtcttgtctcaccctctccacactgtgagttccctgagggcaaggcctgtgtcattcacctctctactcacagtgaggcaggaaatggaacaaaatctcacccacttccttattgctgtatttgcttccctgggtgcttgaattccatcccttctgacctaaaccacactgaccccactgtcacagcccctgaatactggatttctaaccctcatttccctccagtgtttgaggctgactgatggactccccactgccagctccaccagccctggcccatcctcatgtgtcacctgccttgtgagcttttctgaaagcttctcctgagagtgcacttgttcccaacaggcatctcaaagtccagaatgatgtcctgcctggttggaaggggtcctgttccccagtaatccccattaagaggttgctagtctgcagttcttgctctgtctgtttctaagccaaaacagcacaggcagttggctgccctgctgccaaagcaaggcctgggaagcaatccagcctcatcctgatgttagacgagcaagtcctggggaaacagatagatctcatcctggcctcagaggggacagctaaattgtcaaacagcacactaatgggggctgctgactgcacaggtatctctgggttataaatgcccagcaccagagagcctcctaagtcaccagaggacaactttatgatccagaaagtaaagaactggaacaagatcagcttgtgacagggatcaattgatcggggactggagagagcttggcccgggagttcagaactccataaaacttccaagctcagcactttcttgggggacctgcactggccccagtacaaggagcccagaaaactgactgagagctctggagggatgtacagtgttggcctgcagcatagatgagggctaggaaggagcttccctgaacttccccagttcattctgtcactactctcagcccagttgattatgagcctcctttttggaaaagatttcagtggctccccatcacccttaaatgtcagactagtctccttggcatggcaatcaggacttcgtgagatcttaggttgatgagcttgccagcttcattcacatcttacagggtttctacctctgtgttccagccacatttaaagtcttgggtttccccagttgtgatgtaaactgtcacctctgggctgtcatacaagctgttgatttctttagccttgaaggccattcttccccactttctattcatttggatttctttcactgaaccttcaggttttagcccagatgccatctcttccatgaagccctccggggttaggtaccccttccatgtgcacataatacgttctgtcatggcacttgtcacacagtgtatttgcatcttctgtttacttgtctatctccccagcaagatctttgtggggtggagtgggaaaggatgtttatcattttatttattgttttattcctaagccatcatgctgcgtctgacacatggagaatatttgttgaacaaataagcgaatgaatgaataaataaataatatgataaatatatgaaatatcatgatagtgggaaaaaagttggaccctcccagggcatcccctctccctgtctgcactgcttttgacccctgcccagcaggcatctgaagctcttgagatacagtcatcacccactgatgccacatccccatcttctgtcatcccgtgcctgggaatgttcttcttcctcacagtacttccagactcctcaagtcatagcctcttccacgaaggaccctggaatttcttgtctggcaaaatacccattgtgcctgccccaccctcaaggtctctcagtattccttgcatagctctgtcttcatttattatttttttagaactgaggtcttactatgttgcccaggctggcattgaactcctaggctcaagtgatcctcctgcctcagcctcccatgcagctgggacttcaggcacatgccacagtgcccagcctatatagctatatctaagcactttctttgttacattttcattgcatattttaatgtttcattatggttttctaaaactttttattgagataattatgtattctcacgaagttttaagaaatattaagaaaaacccatttacccttcatccagtttatgctaatggtaacacctcatgtaactatagtaccaaatcataatcaggaaattaactttgatacaattgattgactttagtcagatatcaccagttttacatacacttgtgtgtgtgtgtgtgtgtgtgtgtgtgtatttagatctgttcagttttatcacatgtagagttgtatgactaccgccatagtcaagacacagaacagtttcatcacaagcttccctggtgatacccttttatagccatggccagcacctttcctccttcttctccctgatcactgacaatcaatgtgttcttgatctctataattttgtcattacaaggtgctgtataaatggaatcatatggtatgttaccttcagggatgggcttttttttcactcaacataatctcaacctggatggatctcatttccatacaagttgttgtgaatattaatggtccattccttttattgctgagtagcattctatggtatggatgtactacagattgcttcaccattcatccattgagagacatttgtgttgtttccagttttgggcaattaagaatgaagctgctataacattcatgtacatgtttttttatgtgaacatatattttgttttcatttttctagagatgactaatgagcatatgaaaggaagtttaacatcattagccattagaaaagtacaaattaagacaaatgcaaattaagaccacaatgatatatcactacacagcaaacagaatggctaaaataaaaaaaatgattacaacaaatgctggtgagaatggaaaaactggattacatccattgctagtgggaatataaaatggtacaaccactttaaaaaagaatatcactgtttcttacaaacctaaacatgtgcatatcatgtgacccagcaattgaagtcttgataattttaattgtattttaaaacaagtttttaaaaatgtatatgtaattcatattcatggtagaagtagaaatacaaataaacataaagaaactatctcctataatactgctatgtagacataactactactaatatattggtataatgtgcatgtattattttgataaaaaattatgccataatgctttatgacttttttttacaatatatcatttctctccttcatgtgaatggatgtccatgctatcatgttaacatttgccttatattaaatttagcaacttatttcactaaacttagacatctaggtaatttcaatctcctaataataatcaacaatatctactaattaggttccttatttacatatttttggtaacttaatgaataatattcttttatttatttatttatttgaaaacagggtatcactctgccacccaggtgggagtgcagtggtgcaatcatggctcactgcagcctcatcctcccaggcttgggcaatcctccaacttcagcctcccaagtagctgggactgcaggcacacaacaccacacccagccaattttttgtagagatggggttttgccatgttacccaggctactcttgagcacttgggttcaagtgatctgtccacctcagtttcccaaagtgctgggatttacagccatgcgccaccatgctgggccataatagataatattcttaagataaatccaacacgtagaagttttggattaaagtttttctcatttttaaggcttttaataaaaattcccaatggctgtttagcaatgctatactgatgagcccttcatatcccagctgcccatgagagtgactgcttcttcctagtatttccaacaatgatcattgtaattcttttgattatttgttagtctgatagctgaaaaacgttaaatcttagttatattaatttggatcttaaaaattgattgccagttggactaaaaaacttatttgtatttcttctatcttgaatgcctgttcatattctttacccatttttctatttagttgcatgaataaacctttgtcatgtatatttcatttcttttgagtgtcataatttgttttaggcctgtagttttttagcaaaatttaacatttttaatgtagtttgatctatcagtctttttccttatgtgcttttccctttggttccttctttggaagttcctcctcactctaaagttgtataaatggtcatctgtgttttatcatactacttttatggcacaatttttaatttaagtatttaatccagcagggattcatttagggattggatataaagtagggatttagcttgtttcccagtagctaacttgtgtctcagcctcattccttgggaaattgatccttcaccactgattgaaaaggtctcctttgttattgtctatgtttcatcacttctcaggtctgctgtctctcagaaatgtctaaagccaccttattcagcttgtgaatagcctgcattctctctgacattatcttaattttccaggatatgtctggggtctccttctggtgatttttcctggtgagctcatctgtctgtaggcagaaacctttatctttaattcagtaacattttattacactatgtctttcatttctcttctttatttgtggtacattctattttaggaatctttattgtctgcctgtggttcttcattctctctgttttccaaatctttcaccttctgcccaattgttttaatttctttcatatttgctttctacattactgacttgatgttctgaagcttcagtactactctttcctccctgcaaagtggctttgtttctgctataacgtttttagtttccttactattcttccgttttggataaaccttccttttcatctaaacctgcttattttcctctcttgtgactttctctccctctgacttagaggtcatgccttcttgtgcactcctgaaaaagcaaacagtttcctgaatttttcttctcaattctgcagtatctcatttttagaggtatgctcttcctctcacacagtagaatggtgttcccattcctgcagtagctggtattttccctattctattttaagcaaaatggactttgctgagacccagtgaggttttataggcggggttaatagcttattctaggactccatttctgctctctttcagggtgatttaattatcttctcagtttgcaccagctgtggaggagatcaatgtgtgtaggtcttagttcaatttctcatacctgaaatgctttctcttgatgtatctctgctctgctcaggtggcacggcagatctaaagcatctggttcttcagttcttctggtctgatgcaatatgtgaaaaatacagtttcctgcatgcaccacttctgggtcatgactgtctttaccccctctcacagagtgcttttcccataggaccacttctaggttctcagaaggcattgcaccatttctagtccttgggtagctatgctgtgtatagatgttttctgggcaaggaagagaatgtaagtcatgaagtgaaaactttcttgactcacaacatagcccagttcctcattggtagtagccctgggtctctaaggcagggcagaagctggactttattacctttttcttcatgcaatctctgttttaggcagtagagttaggatgagcatgtactaagtctggggaggttttctcaaaccatctctgatgcagataccacccattctgacactgggttatatgtcagtattaaagataggttgttgtgaagtttcaacatttttctgacactataataaatttgctaaaaaatgtgtgaatgctttggggataccatccccattttgagctagaaacttcttaatatattgcgttaaatcatttattcatttatctgtcttttcctccaccatttgtctgtgaggctttgaaagaattataattcaccactacatcaacagtgcctaacacagtgtctcattcataatatttgatagatttttaaaatttatactgggatgagattgccaagggagagaaagtagagagagaaaaagggatcaaggataggcactgggctttgagggacatgatggcgacaggaggaagaagataagccaggaagggaaacaaagaagtcacagtcagagaggcaggaagagagcagagccggaagcacaaggctgcacaggctgactgggctgggaagacaggtccatggcatcagtgtcagccaggtggctatgcagggtagtgagtcaagtaaacccgatacctggtcagtcactggtgatggttaatttcagaaccatgatggagacaaccccttccctagttggaaggctgagtgggttgagaaagtggaagcagttaggcatagatttaaaaacaaaagggaaagaaaaaaagagagcttgagagaaaatcagcatgccggaaggttttttgagttactgttgttggaatggggaagatttgatcagcttcatatcttaagggaaggtgattgtgactagaaacagcaatttgccagacagagaagggatatttgaaaaagccattctgagtctaatctgaagaggataaaatcagatatgaggagagaagggatggtctgaaaattccttgagaacaagggctgcttcttaccagaactggtgagggccccaagcaaggaaagtgcaggtgacttggatgcagaaatactgtggactgtggtaaaaatatattcaggtgagaaggaaagacggtgagctgctcactcctcacctcctgcatcttagtaaaggaggaaggatcatcttcagaggagaagaagggctgggcacagcccaggctttatgaagaaggaaaaagaaggatgagaggattgcctggcagctcccaggcccaggctaggagcagaagaagcttgtagacatgttatggggcagtactaccagagagcctataaagcgtcttgcctcaggtggccttgtgactctgtggtaacattgactggctttctgggaggctaaggaaagcttttaaaagtggccttgattaagccaggaaggaggatctcccttggaccaaggtctgctctttctcacttttcttgcagggtattgctccatacttctgtctccaaagatgttaagtacataggctgcaggcacacaatgcactctgtggagatgctccttgtcctgggtcctctggtccccaggctggtactcaccagacatggaaagtagttctctcacccctatgcatcctgcccacctcctcactggaaatttacttctccaggaactaacttgaatctttcaactagactggcttagcactgccagctggataagaaagctgcatgtgaaaaacctagctttgaaatggaaagatagcctgctgttgaaaaatgaggtctctcttaattagagaattaatcaattaataaatacagcatcttttgacagacttctgtgtgtcaggtgttgacaccatagaggtgatgaggcatcatctctgcccatgagaagggtacatatagctcaatacaggaaactgacagaaagacctttaagagggaaaaaaatcattccatgggggaaatagtccatttaaatgagaggcagagggatagattaagtgacagctgaagccctatcccaagcaagtcattttattataaaacaggacctgcaaattggcttttctttttcgtattcttcctcaccttttcaaacaaataattaatcatgcaaaaataacgcaacacattctagaactcaattcctagtactactctccagagtacttgaaccgtgtcctggggttggcattgttacaaaaactcttgatgagaataatgcctgatattgtgcaattgtgtgcagttggcccgtcttgcatggttctgtgtatgcacatcaattacacacatttgttataatttgcctttttaaaaatcacaccttctatttcaccccaagaagataaatggatcctgcctcagtcccagttccattgattttttgtggtcctatggtgaagctattatcaacactaatctcaaaccctgccaggagccaggaaggccttagaatacagaacaccaatttctgcaacttccaccttatttttcttttcatagacttttgttctgactcccctcctcatctcattttcaaatatgatttgattatcatcatgtgaggtctgttcagctggctcggagcagacaccttttccatgtatctggcctggaggaggagggtgtcagaggcctttcctgattgagtgctgatcctccttggggcagggtgttcttgcaactttgaagactcactccatggcctctgtctccagcagtgtgaagcatgaacagccaggcgggggagcctgcaccttccatcttgcagctctccaaattacttttctggggaggagaggaagaaaagaagaaatgggggattggaatcaagaggctacaaggcatctgggaggttgctaacagtgagctctgtgtttgaagatggggtggcagtggcgatgtgtccagggcttgcagggataaatgtcggctggtcccctgcctccatctcccagggctgttctatagcctcatggctgtcaaacactcccacctgctgctggacccatgaccacactcaggactttaaaagatcatatgccaatttaaagtattgacaaattttgagaaggtaaaacattcagttcattaaaatatttccaaagggcatatagcaaagccttccctcaccactaaccccaggcccaatggcctcccagagcaccactctcactggcttttgtggaggcttccagggacagcctaggtgtcgggcatgcactcagttcttccctttgctgctgctgctgctgcttccttcttgcctcctctatgttatccttctcttcctcctccttctttcctcataatgtatcttatagatgattccataccaagactcataaacctgcctcattataaagagttgcatagtatcctcatgtatggatgtaccataacttatttaactagtctcctattaatagttgttgtggttgttttccatctttttgtcatcaaaaagaatgctgtccaaaagaactgaaagcagagacttgaacatatcatttgtacagcaacattcacagcagcattattcacaataggcaaaaggtaggaacaatccaactcttcatcaagagatgaatcgataaacaaaatgtggtatatatattgaatggcatactatccagccataaaaatgaatgaaatgttgatgtatgctgtaatatggatggaccttgaaaacaatattcagtactgacatgttttgggtctatgtccccacccaaatctcctctcaaattgtaatctccatgggtccagagagggaggtgattgaattatgggggcatttattgatttgcatatattgaaccagccttgcatcccagggatgaagcccacttgatcatggtgcataagctttttgatgtgctgctggattcgttttgccagtattttattgaggatttttgcatcaatgttcatcaaggatattggtgatattggtctaaaattctctttgttggttgtgtctctgcccggctttggtatcagaatgatgctggcctcataaaatgagttagggaggatttcctctttttctattgattggaatagtttcagaaggaatggtaccagttcctccttgtacctctggtagaatttggctgtgaatccatctggtcctggactctttttggttggtaagctattgattattgccacaacttcagatcctgttattggtctattcagagattcaacttcttcctggtttagtcttgggagagtgtatgtgtgaaggaatttatccatttcttctagattttctagtttatttgcgtagaggtgtttgtagtattctctgatggtagtttgtatttctgtgggatcagtggtgatatcccctttatcattttttattgcgtctatttgattcttctctctttttttctttattagtcttgctagcggtctatcaattttgttgatcctttcaaaaaaccagctcctggattcactaattttttgaagggttttttgtgtctctatttccttcagttctgctctgattttagttatttcttgccttctactagctcttgaatgtgtttgctcttgcttttctagctcttttaattgtgatgttagggtgtcaatttttgatctctcctgctttctcttgtaggcatttagtgctataaatttccctctacacactgctttgaatgtgtcccagagattctggtatgttgtgtctttgttctcgttggtttcaaagaacatctttatttctgccttcatttcgttacgtacccagtagtcattcaggagcaggttgttcagtttccatgtaggtgagcggttttgagtgagattcttaatcctgagttctagtttgattgcactgtggtctgagagatagtttgttacaatttctgttcttttacctttgctgaggagagctttacttccaagtatgtggtcaattttggaataggtgtggtgtggtgctgaaaaaaatgtatattctgttgatttggggtggagagttctgtagatgtctattaggtctgcttggtgcagagctgagttcaattcctgggtatccttgttgactttctgtctcgttgatctgtctaatgttgacagtggggtgttaaagtctcccattattaatgtgtgggagtctaaatctctttgtaggtcactcaggacttgctttatgaatctgggtgctcctgtattgggtgcatacatatttaggatagttagctcttcttgctgaattgatccctttaccattatgtaatggccttctttgtctcttttgatctttgttggtttaaagtctgttttatcagagactaggattgcaacccccgcctttttttgttttccatttgcttggtagatcttcctccatccttttattttgagcctatgtgtgtctctgcacgtgagatgggtttcctgatacagcacactgatgggtcttgactctttatccaatttgccagtctgtgtcttttaattggagcatttagtccatttacatttaaagttaatagtgttatgtgtgaatttgatcctgtcattatgatgttagctggttattttgcttgttagttgatgtagtttcttcctagtctcgatggtcttttcattttggcatgattttgcagcagctggtactggttgttcctttccatgtttagcgcttccttcagaagctcttttagggcaggcctggtggtgacaaaatctctcagcatttgcttgtctgtaaagtattttatttctccttcacttatgaagcttagtttggctggatatgaaattctgggttgaaaattcttttctttaagaatgttgaatattggcccccactctcttctggcttgtagggtttctgccgagagatctgctgttagtctgatggtcttccctttgagggtaacccgacctttctctctggctgcccttaacattttttccttcatttcaactttggtgaatctgacacttatgtgtcttggagttgctcttctccaggagtatctttgtggcgttctctgtatttcctgaatctgaacgttggcctgccttgctagatttgggaagttctcctggataatatcctgcagagtgttttccaacttggttccattctccccatcactttcaggtataccaatcagaggtagattttgtcttttcacatagtcccatatttcttggaggctttgctcgtttctttttattcttttttctctaaacttcccttctcgcttcatttcattcatttcatcttccattactgataccctttcttccagttgattgcatcggctcctgaggcttctgcattcttcacgtagttctcgagccttggttttcagctccatcagctcctttaagcacttctctgtattggttattctagttatatattcttctaaatttttttcaaagttttcaacttctttgcctttggtttgaatgtcctcccatagctcagagtaatttgatcgtctgaagccttcttctctcagctcatcaaagtcattctccgtccagctttgttccgttgctggtgaggagctgcgttcctttgcaggaggagaggcgctctgctttttagagtttccattttttctgttctgttttttccccatctttgtggttttatccacttttggtctttgatgatggtgatgtacagatgggtttttggtgtggatgtcctttctgtttgttagttttccttctaacagacaggaccctcagctgcaggtctgttggagtaccctgcagtgtgaagtgtcagtgtgcccctgctggggggtgcctcccagttaggctggtcaggggtcagggtcagggacccacttgaggaggcagtctgcccattctcagatctctagctgcgtgctgggagaaccactgctctcttcaaagctgtcagacagggacattttagtctgcagaggagactgctgtctttttgtttgtctgtgccctgcccccagaggtggagcctacagaggcaggcaggcctccttgagctgtggtgggctccacccagttagagcttcctggctgctttgtttacctaagcaagcctgggcaatggtgggcgcccctcccccagcctcgctgctgccttgcagtttgatctcagactgctgtgctagcaatcagcgagactccgtgggtgtaggaccctccgagccaggtgcgggatataatctcctggtgcgctgttttttaagcccgtcggaaaagcgcagtattcgggtgggagtgtcccgattttccaggtgccgtccatcacccctttctttgattaggaaagggaactccctgaccccttgtgcttcccgagtgaggcaatgccttgccctgcttcggctcgcgcacggtgcacgcacccactgacctgcgcccactgtctggcactccctagtgagatgaacccagtacctcagatggaaatgcagaaatcacctgtcttctgtgtcgctcaggctgggagctgtagaccggagctgttcctattcggccatcttggctcctccccacatctgatggttttataggcatctggtatttctcctgctcactcttctctctcctgccaacttttgaagaaggtccttgcttccccttcaccttccgccatgattgtaagtttcctgaggcctccccagccatgtggaactgtgagtcaattaaacctctttcctttataaattaaccagtcttaggtatttctgtacagcagtgtaagaacggactaatacaagtactaagtgaaagaagccagacacagaaggacaaatattgtatgattccacttatatggggaagaagaggcaaattcatagagacagaaagtagaacagaggttactacgggcagatggggagttattgtttaatgagtacagaatttcgtgttggggatgatgaaaatgttctggatatagatagtggtggtggtgatataatattgtgaatggatttaatgcaactaagttatattcttacaaatggttaaaatgataaatatttagttacagtattttgcaccataaaaatgacaataaaagattgaaatgttttgccaaagcctaagaaagagaatgatgcaaagtagcatatacctgtaatcctagctacttgggaggctgagagaggaagattgcttaaccccaaaagttcaagtgcagtctgggcaacatagtgagacactgtttctaaaaagagagagaatgagaggagaatgctgcagtgaacatccttgtacaatagagtgctctgtaggaatccaaatatatctatacggtacattcccagaaatggggttacaaagtgggaaagtgtatgcattttaaattttgatatatgatgccaagtttttttttttcaaaatattgtgctagataatgctcgaacccatgaagtatgagggttgaccattagctagtatcaaatattttgatctttgccaccccgacagctgaaacatggtacccttgtagatttaacttgcatttctcttctgggcttatgctatgtgaatggaggtgagacccaatggatcaggagtcactttggttccagatcaaggcagaaacaggtcaggagcagcctagaggcaaaaggaaggctggctgcctgggatatgaaagatctgatttagtctacctccttttcagtttcccactacctgcctcaactttatcatgtgattcataggaccatggaatagcaccttgaaagaggacctgagggtcccagctgcctaacgcagtagcaattctctagacactcccttacctcccttgcagagcctgggtacacagctaatgacaggaagttcactttttttctgattgttggaaagattgtttcatcaaatgcaccttctggtggtctccagcccctaatcttagactttctgaagaaccagacactcttctgttagtagttcttaggccaattacctgcaaaaataaagcccgaaataatggcaagtggattcatgaataaatgaatgatgtgcaaactccagtcactgttgttcgtattatcttgtggcttccataacaatacagaactctttggaagggatgtccttaattcagaggatagtgagtgggccttttctgggatgcagactcaccctaggtcatggcaggaagtgcatattcacctgcacacctccatctccttcacatattgtgctgcaaagccaaggctcccgatttataatttacatttgtcctgtataaagagcaccttctcttggcttcaatccagaatttcaatccccacgtgatcagtctgaatcttaactccccagcattttagtcattcttccagctttctgtcacttcctgatttgatatacatcttgttaaatacttttcctctacttcatggattaagctgttgatcaggtcaggacgaagggcagcaccaggcgatgacatcccatttctcagggatgacgggacacagttatttaacagaattattactaaggggatggccgaggccccagccagccttcacatccgtgacaaaatcatgaggggaggctcaaatgctctgctgaaatcaggacaactgagattgtgggaggaggcaggggacaaaacaggaaagctactattggcgcctgagctctaactaccaaggaagaactagatggttaactagatgggggcatgcagggcaaagcatcagcttggtacatggaacagaaagaagagaggaggctggttgcattcagacacgtagatagaattaaggaataatcataacaaacatatacatagtgcttactatgtgtcctatgcacacttacaatgtgaactcatttgattcccaagcattcctataaggcaaatatcattattatccccattttacagatgaggatgctgaagcacagagaaaggttaaatagtttccctgagtcatgctactggggtttaaacctaaacaggctggctacagagtgtgttcttaagcatttcactctatggccttgaaaagctcagcctccatgatattatcaaatgaatttcaaagaatgcactggcatgttcagccagcacactctttgaaagtggatttgaaacacgctagggattctagttcccagggcagtttctttaggaccagcagtcccttgtggaatcttctctcagcaaaatgggagaggtgaaaattgctgctatgaggagcagttaaataatctgtctcaaagggtgtctcgttgtgctctgaatgtgtaaatggcatttcctagttgagtggaaatggcatggggccatccgagagaagagctggatccagggaaggcttgaccaccacctagcaccttggcctttatttgctccatctttggaaagatgaggctgacccaaggacaacttcagtgtagttattttacttaagaaagagttcagtgtgtcttgagatggaggaacacaactcacatgtctgggtgttagaaagattgagtgcattcagtgcggccaggcccttcactgggcaggtgtggtcacaggggcgtggacttatggatcccatcctactctgttgcagagtcccagggccatgggttgcctggaaggaaaggaacagcataaacccccatccctccttgtctgactgggaggaatatggatgcaggagcagatgtgagggtagtgattagaaaccctggctgcaatgaaagccaccaggaaaggtttgaggccctctgatgcctggcccatctccagagttggattcagttccctctgactcacctgacagcggctgaagtctacaggccccagagccatgaggaggacagggcctgggctttaatatttttactaacgttccctgggtgattctgataaccaccaaaatttaagaaccattggtctggggtctggctcagaaagtcatgtattaaagggcctgggtgtcttattatgcagctcagctactataatttgggggctttcctgtatctgtagatgatgtatcctgtatctttgagatgcagaaaacagaaaagtacagagaaagaaaggcaggccttggtgagcccaagcaggggcaaaaaataccaagcttctcccactgccaaagctgcaggcactgagcctgagggcccccaggccctggagagacagagggtttgcaactacctgagaagcttcctaacagaaggcattgctaagattttctaacatcctaatgcagaagcagtgtttagtgatggggagcaggtcacattttaggcagcttatcacccaatttgccttcttttaacctagttttaattaccttttacttcaaatttatggaatctgagtactacttagagcattatttaaatctgttctgttatgtaaaataaaaacgtttctgattatgcttttaaagaacttttttgtgtgaaaatagtagacgctattatttgctttttaaatcaagtaatgtacaaaagtacaaattttaaaatgacaaaaaacaattacttcaaattccaccatccagaggaaatcattaacatttggtgctgcacagctatccctctgatagaatgatagctaattaggtgaattcaaacacatttacaaaaatagaaaattactgtatatcttttttaaaattaaaagcaatataatttgatttgaatttaatagattaaaaaattaaaatgaaagtgcaaaaattgctaaagttcaaaaatgtttttcttcattacaagttattttaatttctgtaaagttttttgggtagagtaaagatgagatttattcacattttaaaaatttcacagtatcccttgatttcctacttcctctccttccctcatccccctactctggatttcttatgttactacttttacattgatgagatgtgtagctgttacattctgttctctgccataatacacaggcattttttttcttatccactcagctgccattgcctgttcttccactatggtttctttgtcctagaaaagtggttcttaaggtttaaagagtatattaagtgcttgggtattttgttagaataagaattctggtgcagtgagtctgaggtgggccctgagggtctgtatttttttctgtttttttttttttttttttttttacgcagagtttcactcttgttgcccaggctgcagtgcaatggcacgatcttggctcactgcaacctctgactcccaggttcaagcgattctcctgcctcatcctcgcaggtagctgggactacaggcaagcgccaccacgcctagctaatttttgtatttttagtagagatgggatttcaccatcttggccaggctggtctcgaactccggacctcgtgatccacctacctcggcctccaaaagtgctgggattacaggagtgagccaccgtgcccggccgagggtctgtatttctaacacctgcccccaacctccatgatgtcagtactgctgctgcaagagccacacttggataaacaagttctaacatttttggtttatgttactttttgtttgaccagattcccagattccattttcaggttattcgccacccacctcccaccctccatagctcactggtgctctgttccctgaagttttgagaatgcttgaatcttcttgcctatttgtgtacatggggttgcaggggcaacctgcctgggtttatatacatgggtcacataaattaaaattcctttgctcagaattcatggacattgcttcagtgtcttatggcattgaacgtggtcagctgaacatggcattgcagtggtcagttttagggcaggcctcatttttacttcttttaggtcatttgatttttttctacctggatgtcaagaagattccttctttatcctggagatttagtaatttcaccaggatgcatcttgattttatcttaggatgtattttgactttttcaaatggcagttccaagactttaattcaagaagcctttcttctgtgtgtttttgaatagttttctgttatatttgttggtgttctcctctccagagtatgaatgaagcgcgtgtcgtgggatgcccaggagtgtgccttctgctgagggtgctgggggtcgtagccactgaggctgctgctctgcctgcttcatactctgttctggaagtttctttcagccaggaggcagtgaagatgggagtgggggaaacagagacagaaagaacaccctctgagctatcccacaggtccccacacttcccttacaacatgtggctgtcttattactgcagggcctctcaggatgcaacatttgcctttagagaaacccaaatctgggccaaagtctgaggaggtgtgagtctgctttcattgttcttccaaattccagtgcattttctactaggtggtttgtaatgccaccatttctttattttcgtgaagattgatttttctcttttttcctatctcctgttttgaagggtgtcaagagaatagggtatagaaaaactgtatcctgacaatgcagtccagattttttttactggataaagcaatactaacttgattttcatattctttccttttggctattccatgccagagagagtctgtcagagtcttctatatacgtaatgagggaccacttgatctggtggcagtgattcaaactgaaggtgccttgtcctgaaggaatcaataatctctgaataatacaatgtataaattcagtaccaccaagcaattactgggcaatcaggactgtcactgctccaggacagagtagtgctcagctgagcacatcagggcattctttgctcccaaggcatcaacattgcagcttggtgtttgtgcttggtgtgcatttggctgccatgtggcagtgggctggtgtgtgctcagtaagcacagccagtcctcaaggctgacttcctggaatagcacatggtggcagtcagtgaagcggccgctcactcatggctggcttgtacacacacacttagaacatcctccgtcagttgccttgttctggaatgttcatgaaggtgtgtagcttattaaaacaagaaaaatacccttcatttatacatttacctagagacatgacagaggacatagagagcttcagaaaaacttcattttcccctacttttcagtcttggccaaggccagattgtggttcaaatttgttggatttagttggcatatttctttcttgtttccccaattaacatggctaatagagggatacatgccaggaggtgcctggctctctgtccccactgccctgtctcctgcagctgtaggaggtcaagcctgtgaggatcccccaagccaactccctcagagggagaataaacatcagctcaagcttctcagcttattctctgcaaaggctattttattggcaaatggtgaactagcagaaactctgaatccactgatccagatccttgagtaaaagccacatacacccagcatttcatataatatatgtatttgcatgtacatattttattgaaaaccagggactttgctggaagtatttaaaggtaaccaaaatctgccttttgcagtacatttccaagctgagacatcataatagatgtggcacctgatgatttcagaacgaaagcctttcaacctccaaaatcatccccacctttacactacttacgaatgggccaaacgggatggggagtcatttccgtttatcagaaggaaagctgacagcacaggaatgcagtcacttgcctaccttgtctataccccaaatgtgaaaaaggacaacagtcccaccctctcaggaccttagtaacaggaatatcgggattgagtgagtagcagaggtttgcccctgcaccgtcattgtgtggtctacccctgcagtgccaactctgcagtgcccacatctctcatcaggacagctgtagagtcattgcctgcctgtcagggggagtgggaaatgagcagattgcagacactgggaggtagcggcctgacctgctatatcaccaccgcataccgaggaatccgtatgtcggaagacacatctgggagagttagcgggtgatttagacagacaatcttagggtgagagcagagagacagaaaaggaggcatcaaccactgggctgagaatcctggggccaagttgctttaggaaaggcaaccactttcagtggtttatagtccatattacaaccacccagcccgcccagcttggaacaacttagctctataagggggctaatcttatttccaaatatattcccaaagagaatgtccacaacctcccttggtaaccagaggctaaagttacaactgcaacagtgtttcctcttggctgtggatgttagcacattgtaaacacttgaatatatgactaactcaattacacatcaatcaagagagcttattcctgcttgaattcaggtactttaaaaaagtctgatggaaacagtgattctgaaggttgaagatgagattctatgctgtgatgaccctatgtctaatggtggtggtggaaacactacccacaatccaaatgttcattcctgcttgagtcgggagccatggggatgggattcttggggtgggaaaggtggagctgggttattgggaggaggaggtctgccctgtgagagtgccaggaaatccaaagggcccaggtggtcttccctcctacttctggggagctaggatgtgggcacctgatctcaaaccagctacctggatgctcctgactcgggctttgattgttaatggagggaattgaagattcagggagaattgagacatctgcaactgcatcaagtgtttggagggtgggcagggacagaagcgccatccagaatgtccagccaggtcactcagtccctgtggtgtggcccatgctctatggcccagcccgacttgattctgagaactgcttcaaagctttccaaaagggggccttccttttctgtttcttttattcacagttcatttctgttgcttataatcagaaatcctaactgatacaagagtggtgctgagttttgagttatccaggtatttatttagtaggggaaggctgcttctagcaggaagaccatacatactgagtggactgataaatgtttaattttaatgcagcaaattggctattgagtgtgtgctggtggctggcactgtgctaaacactgggaaaacatgtgtccttgtggggctgcagaccagtggaggacacatgcctgcccagcgtccaggtcacccttccaaatggatcacattttgaagcctgccttgcctgatgagagcatgtgtcattcatgaagcaatttccctgcaggccttagtggagtcacacagagcaaggccctggcattccacagtgatggcccacctggagctggctttcatgcaggcataaatcaccctctcttttatgagttgttatacttatttcttccagtttttgctttctggttttactttcctttcttcttatttaatagacctcaagagggaaagaatttctggtcacagccaatcacagattaaccccctgtctttaggaacaaaaggaccctgggctgcaggtgtgtgtggaggagagtgggggtgtgttagaaactcccgtgtatggcaccccagcctcacaggacctcacctccacctctggtcctgactccccctgtgcgtggccattccagcaactgccctcttgccttttgctcatggagtctgactacatccttctgtgggccggactgccgctttcatctcccagtgacagtgcttttctcagtgctgtccagttgtccagtgcctggttttttttttttgagatggagttttgctccattgcccaggctggagtgcagtggcatgatctcggctcactgcaacctctacctcctgggttcaagcgattctcctgcctcagcctcccaagtagctggaattacagtcacatgccaccacacccagctaatttttagcatttttagtagagacggggtttcaccatgttggccaggctggtctcgaactcctgacctcaggtgatctgctcgcctctgcctcccaaagtgctgggattataggtgtgagccaccatgcccagcttgttttgccatccctaatgtcactgggcatctaggtctctgggagcctcaggatccctggctgcttaccaatgacccagtggcctttggcatacccctgagagcagacagagatctgctgactatgaaaaggtggcacagatccagaaaatgctgatcttttaacctggatgaacttgaaaatggcctgggggaggttttaaataaagatggagtgtgtctgtggctgggactgctttagctggatagtctgggaaggcctctttgaagaggtgacacctgagctaaggccagaaaaatgaggagccaaccacacatagagaagtgggaaaggcataccaggaagaggacccagacaggacaaaggccctgaggtgggaagatcttggcagtgtcaaggaccagataggaccatgggctggaagtagcagaggagaagagtggttgagatgaggtctgggaagtagccaggagctagtggcagcagcacagacgttgctctcaactttccttcctgacaagtggagaaagctagccctcctggttggtgcaattataaatgggtaaaggtggggatgagtttggagattgaagggccttcattctgaagtgatcagctgccacgtctactttaatgtcatagtttaagagaatactaaagaagcaaggtttgggtcaccttaaagtacttccagcaacagcctctgttttccaataaaatgcagatatgcgataatagcatatgaaatgataggggtgtgtggtttcacctaggatctgtgtcagtgggtttgatggtttcagattttctcctgattcaccatttgccaataatatactctttgcagagaaacaagctcaggctgaagtctattgcctctgtaagtgtgaaggaagctgttggagagattggaggaggggaacaagtgatccaacctaagtgaaacaataattctaataattacaaccaccaccactctgggcaatatgtgcacagagctggttgcagtgcagccagtgtggaagagcagactttgaggggctgagggcaagaaatgccagttgcctttcccatggccacccagtgcatcagtcataggcaggatcaggcctaaagacccaccctggccagggtctggctggccaggtgagcccaggctcccctacatggcagcggggtgccagttccttcctcttgcctgggaaaattaatagctttttttccttctttcaagatcaaaataaaaatttcactgattagcattgcttccatcccatccatgtgatgtctcttccttaaaagatcccatcaggctcctttctcgggactctggccaggtatgtttgcccgctgcagagattcccagagttctcctgcttatctgggctgtagctcaccccaaacagctcccttccctcatctccaggcatccctgaagcttgaagggaaggaggaggcagaactggcagacttcttccttaggcaggctggggacatattgttcaaatttaggccttatcctccaagaatgaaaatacgtgatgcttatgtgaataagtatttgtgattgaattaaatgtaagtacagggcacttctaattcacagctctgtgtgcaagtgcagggtctgtgtcaccaagcaccgccttcactgctgggctggcagtgaaggtggctcctgcatctcccaccttccctgctcatctgtcttgtttgcctctcccagctttgtcaaatgtaacgtgaaagaaagggaaattaaaagaaaacaaacaaaagagagattttcccagaggggaaatcagatttatcctaaagtaattaaatgtgtaggaaactgagaacaaaggattgcaaatagtgtgcgtgtgtgagtgagagagagaataaatcattatttcactggcagccggagccctccaatgaatcttaaactcaggtccctgtgaagtggagtaggcaggggaatcggaccatagctgtggctctggtgtcccagcacctgcttcccgtagctcccacagctcttctgctaggcttggggactgggggactggggtatgccctcccagtcgtggttggtggagctactgttcactccttttctatgctgcctcctatgctcccctccctgtgggactggccttctctgtgttgagtacttgggagtcttggcaggctcctgttgcccaagcacctggtggcactgggcgtgtctttttcctttgtctcattacttagaggctgagtgtgttggggtcaaggactgtgtcttttcactggggcatgcccaagtgtccatgcagggcctgaactgctgtggttgctcagtctgtgtttgttgaattaatgaaggggcccttaaacattcagagacattgaggttgtcgcactatgacctttcactgcagctgctgttgtggctggggaggcaggcacatgcaccatgcctggactgtgagggggggcatgatgagagctccagggagggcagaggaggtaggagaagcagtcaggtaggagatggtgtttaacctgggccttgaaaggtggacaagtctttgacgtaaaggggaaaaaacatcttcttcagaaagttgatgtgaagcccccaaaatgcagggtgcttgtacttccaagcaggccccgtgatcatcccatcttccccatgttctgactagcttagacccattaaggcagaggtaatttgagatcatgtgctgacaagtggctaagaaggccttttggctactatgatgggggtgctgagcaagagctgacttcctgggggcttcctggggacaaagtctacacagcccatctgatgctcctcccacctccaggaatttgctgatgctgtcacttcattctgtaatggcctttctccaaaatgctgccctccctttcttcgaagaccagctcagatgtcaccttcctccctttctcagcccactgcaatcccaccccttcttaaagcacccaccgatctcctccatgaaatcttcccagctccctacagcttcccagcaatctttgttgtgaacatatttagtagatacctttgaacaaatttagcagatacctttgaacatatttagcagattcttgaaacctctgcttacaccagcaaccacaatccacccaccttttcctatgatagacccatctgtgagcctcgcaggacacaaacagtgtctcattcttcttggggacatgtagcctagcactgtgtctgctgagtgaatgccggcctcatttcctccacagaccaatttactaacatgttttcagtggctacgatgtgacagggattgcacatgggctttggtgatggtctcatttactcctcaatgctgaacaggaatgagcctcgccagctgatagggactgagagataggaattctaagctgaggctgtgccttggagaggcatgaggcagagaggacaggggagagagggagcatcagggaagtctgtctgtgagcaccacgtgttcagtggcgtttcctaccagggcctcagccatcacagccaccaaagggagctctgcgtgccccactccacaatacctggaggccccacaccccatacctcagaccccgagcctttagcaccagcacaggaggtggctgcccccacagcagtaggcttgttggctgagcaagattcttccctacctcttccaaaggcctgaaatcccatcacaaagcagtcttatcccccagggataagaatggagcatgtatctggggtcccttaggctggtcaagcagggtggggctttaaaacggcttccaccccaggactctgggggccaaaggggagtcatgtgtgtgcaaagcagacataagcctttaaaggaatagcattgcagttattcatctctgctgtccaaagacttgcctgtagatgaatatgtcagaaaaatgacattttcttttctaatcacagaaataaaatatgcctatcgtagaaacatggaagatatgggagatataaagaaaaaatgaaaatcacccagaatgacaccatctgaataatttctaccagccctttgatatattttattttagcattgtgtgtgtatgggatcacattgtaagcaattttatatccttcatccattgaatattacattgtgatcgttttccctatcattaaatttattggaaaacatttttaatgccttcataatattcaatcttgtggctgatccataatttatttaaccatctcctcctttttgagcatttaagttatttataatttgtgaatattaaaaatatccacaaataataatgttgtgaacaacttcattcataaatccataggcacttttgtgcttatttctttagaataggttcctagaactggaatcaaagggtctgtacttggcaatgagtctggatacctactgccaaggtattggtctccagatgcaggctttgcctcaacagctgagaatgcccttgtcccagcaccttcatccgcattgagcattactgcttcttaaacctctgctaacttggtacaacaaacggtgttggttaatttatctgttcattgattttttttccagctttccaatggtgtgtcagtgttttacttattattttaagtgttccttatatgtcaagtttattaccatttccccaaacatgttacaatatttcttcccgttggttatttgccattaatttttttataatagctgtgttgagatataattcacataccatacagttcacccaattaaagtgtacaattcaattcagtggtttttagtgtattcatagagttgtgcaaccatcgccacaatcaattttagaacagtttcatcttcccaaaaagaagcccttgcccaatagcagccactccccatttcacttcaactcctcccccagccctaggcatccaccaatccatttgccatctctatggatttgcctattctggacatttcacataaatggaatcatgcgctatatggccttttataattggtttcttttgcctagcaaaatgttttcaaggttgtagcatgtctcaatacctcaatttgccattagactttcttatgattttaatagcagcagttttaaatttttatgtattgactgtttcaagctttccctttgtgatctacccctcctattctccgaggttaggtgtcctctagttaaatttacaactatattttctgctaatttttttaaaactactttgttaaaacattaaaataattaaatctcaaggtaatatatggatatagtcctgttgtaagtggctttagtttttacattaattcttcaatctacctggaatgtattttcgtaaatagtaatagggtgagagtctaatttaatttttttttcccaatagtcaattgacgtagtgtatttctaccccatttgctgctactgcttccttcataatttattaagttcttaaatgtacttgggtctatttcaagtcttctctgttacagtgccttgtttatctatgattgtaccagtgttgtattttctaattctaacagttgtaaactaagctacatcctggttagacaagtcacctctcttattgtttttacagtctttcttaattcctttgcctattcattttaccagaagatcttagaattattttgtcacatctatctgtcttctttttaaccatgcattttccccaccagtaaacagctgccaataattttatttgttgtgttttttaaataatacattaatttgggaattgattgtattcagtcttccatctggtaacatatgtttcatattgtcaaatcttattttatatattttattatgtttttaattttttctatttctgtgccacaatttagggccttcccgatgtctttgattgcttttgattttttttattgctattgtgagtggatttctaaaactggttatttctggtattaaagaaatctctccccccaccccccaccggtttacttttctcaacactcttttctaattataagatattttctggttgtttcctttgcaatttctatgtctttaatcatactgtccaaagcgatgattattttttcttcctttttaatagttacatctctaatttctgtttcatttcttattgccctggtctgatctttgaaaagtgtaaagcattagtgaaggggaataagattatttctctctaattttaatgggactgccttttgttgtttcatcaataagaattgtgtaggtttaaagtagaatgctaggaagaaaataacacatattaacttgaaagaatagtaaagaagaatatatatgtttggaaataaggatattgttttccttgttgatcaactgacatgaaattttgattactattaatgaaaacatatgaaactatatttcaattttaggatcaaccttagtcatgttgaatgttgtgttttgtttgtttgtttgttttagacagagtctcgctctgtcgcccaggctggagtgcagtggcacgatctcggctcactgcaagctctgcctcctgggttcacgccattcttctgccccagcctcccgagtagctgggactacaggcgcccgccaccatgcccggctaattttttgtattgacgaggtttcaccatgttagccaggatggtctcgatctcctgaccttgtgatccccctgcctcggcctcccaaagtgctgggattacaggcgtgagccaccgcgcccggcctgttgtgtttgttttacagtgctcttgtttaatgcttacatctgtattaatatgtaaatttctctctctttttttagttacattgccacattttggtataagatttttactaacttcataaaatgaactagacagaattttatattttttaattcatgaggcagttaatatagcatggaattatgtttcttaaaagtttgaagaaacccacttgtaacactactcggtcttggaatctttctcagatgtaaactttggtagttttgaaaaattctgtccttataattgacctcttaagtttttatttgttcttgtgtcacaatttgataatttacattttctagaaaaagtattaaatttgctgggatttttcaattcataagcacagtaccatatagaaaggttttaaaacagaagacaacactgtctgttgttgtatccccttccttattacttgtgttatttattttctctcattctcattatttataacaataatgtagagaactttgcatttaaatgggttttattactcacctccagcttcctcattctcaaattcttcatttggattcattactcaatagggtggagtgtgttttcaagtattatgttttttctaaaatcatatgttataactttagagctcatgtgtgtcttgaagtgtgtttgttgctccacatttagacagtgtgttggtcaagtagaaaatgtctggccacaatcattttctgcaaaattcagtagatattgtccaacgtgttctgttcttgcctttgtgagatgacgggaggctagtccttcattggttatctggtttcttcttttactttttctcctgcctgaattcttgttgatttttaaaagtccttttggacaaatatgagagctttcaaacataatgtattaagatgtattaagttgtttctgtgtgtatgtttgtatgtgtatgttaacaagagtatgagattaatatgttcagtatgatgagaaacaggcactcttactgccttaaaatacatctcccatggagtacagcagtttttctcatcctctgcattagtgaaattttggtctgaataattctttgttgtggggagctgtcctgtgcattgtagaagatttagcaggatccttggcctctattcattagatgccagtagcaccccctctcctcaagttgtgacagccaaaatatctccagaaattgttaaatatttcctggggttgggggttggtgccagaatcgccccctgttgagaatcagtgcaatagaaggtggcctgacttgtatttttttatttagaacttaggggcagaaatagatcatttccactattttatttcaagtttgctctgtttcaggcaaaaatccatttgtgtgcctcagtttatgtttttaaatttcactttcatgacctaataattgatggaaatccctgaaggttctaggactgtgtcaatttgtagtatatgcaggcttcaagtttttacttctagtttttatggtattttagtgggaatctgggagaaactgtgtcaggcattgctgtctagccactattttataccattcttctttttatgtgaattttctcaccctgtgcatgtttatactttaaactctttaaaaaataattcctgtttcttaggagaattgttttgaatatatagtttggtattttaggtgaatatatcactggttaagattataatttgggatgaacaatgaagtagtttattttgggccaaactgaaaaggggccccgctgcaactttaaatacatgtaatcagctcttccagacaccaccaacacttggttcaggccacacgtggtaatgatggctgagctgagctatcagcttacagtctctacctagtcaattctgaaaccaggcagtgatgaaaatcccctctaaatgcaaagaagtgtgagactcagttgaagcatggtgtgaaaacagtttggctgcataccctttgcccaacttcatctcaagagactcgggaaaaatatagaaacacctcctttccatattgtttattttcatgtcacaaactgttgggtggaatgaaaacagggctctagtgttgctctagttgtgaaaatacaacttttacttcttctgttttaatcccagagaggggaagttccaactaatctgctaaagccaccttctttaaaacctttcaaccacgtggtttagaaacacggatggacatcgccagaatttaaaagtgtgctagttcccagccagagcagagcacgtgtctgggggctcccttttcatctggtctccatccatcctacaccggggggttgtctagcacctttttccttcctgttgtagtgggcccactttggaaatggcagcttttcatttcgtaaattaatttctatttttattaaagtaatggattaaacaattccatgagtaccaaaaggaaaaaatcagtttcctgatcatctcccctaccccattcttttccctaacacttcctatctgtttcttagatatactcccattttttgaattatatgcttaatgtgctttattgatgtcaatttagacattgtcttttgacttccctttatcaatgctgaggatttggatctcttgcccctttctatatttttcttcttctcttattttgctaatatctattactatatgtattatatatccatgtggtaattatatatgatttttcatatctacatatgtataatacaaaatgtatatttgttcactttgttaacatatatttacaacttttttgttaaatgtagcgtgtttagattattatatctatacaaccttccttccttccctccctccctccctccccccttccttccttccttccctccttccttccctccttccttctttcttttttttttttttttcaagaaggttacaaagaatatttatttatttatttatttattattatactttaagttttagggtacatgtgcacactgtgcaggttagttacatacgtatacatgtgccatgctggtgtgctgcacccactaactcgtcatctagcattaggtatatctcccaatgctatccctcccccctccccccaccccacaacaatccccagagtgtgatgttccccttcctgtgtccatgtgatctcattgttcagttcccacctatgagtgagaatatgcggtgtttggttttttgttcttgcgatagtttactgagaatgatgatttccaatttcatccatgtccctacaaaggacatgaactcatcattttttatggctgcatagtattccatggtgtatatgtgccacaatttgcttaatcaagtctatcattgttggacatttgggttggttccaagtctttgctattgtgaataatgccgcaataaacatacgtgtgcatgtgtctttatagcagcatgatttatagtcctttgggtatatacccagtaatgggatggctgggtcaaatggtatttctagttctagatccctgaggaatcgccacactgacttccacaatggttgaactagtttacagtcccaccaacagtgtaaaagtgttcctatttctccacatcctctccagcacctgttgtttcctgactttttaatgattgccattctaactggtgtgagatggtatctcattgtggttttgatttgcatttctctgatggccagtgatgatgagcattttttcatgtgttgtttggctgcataaatgtcttcttttgagaagtgtctgttcatgtccttcacccactttttgatggggttgtttgtttttttcttgtaaatttgtttgagttcattgtagattctggatattagccctttgtcagatgagtaggttgcaaaaattttctcccattttgtaggttgcctgttcactgtgatggtagtttcttttgctgtgcagaagctctttagtttaattagatcccatttgtcaattttgtcttttgttgccattgcttttggtgttttagacatgaagtccttgcccatgcctatgtcctgaatggtaatgcctaggttttcttctagggtttttatggttttaggtctaacgtttaagtctttaatccatcttgaattgatttttgtatatggtgtaaggaagggatccagtttcagctttctacatatggctagccagttttcccagcaccatttattaaatagggaatcctttccccattgcttgtttttctcaggtttgtgaaagatcagatagttgtagatatgcggcgttatttctgagggctctgttctgttccattgatctatatctctgttttggtaccagtaccatgctgttttggttactgtagccttgtagtatagtttgaagtcaggtagtgtgatgcctccagctttgttcttttggcgtaggattgacttggcaatgcgggctcttttttggttccatatgaactttaaagtagttttttccaattctgtgaagaaaggcattggtagcttgatggggatggcattgaatctgtaaattaccttgggcagtatggccattttcacggtattgattcttcctacccatgagcatggaatgttcttccatttgtttgtatcctcttttatttccttgagcagtggtttgtagttctccttgaagaggtccttcacatcccttgtaagttggattcctaggtattttattctctttgaagcaattgtgaatgggagttcactcatgatttggctctctgtttgtctgttgttggtgtataggaatgcttgtgatttttgcacattgattttgtatcctgagactttgctgaagttgcttatcagcttaaggagattttgggctgagacaatggggttttctacatatacaatcatgtcatctgcaaacagggacaatttgacttcctcttttcctaattgaataccctttatttccttctcctgcctaattgccctggccaggacttccagcactatgttgaataggagtggtgagagagggcatccctgtcttgtgccagttttcaaagggaatgcttccagtttttgcccattcagtatgatattggctgtgggtttgtcatagatagctcttattattttgaaatacgtcccatcaatacctaatttattgagagtttttagcatgaagggttgttgaattttgtcaaaggccttttctgcatctattgagataatcatgtggtttttgtctttggctctgtttatatgctggattacatttattgatttgcgtatattgaaccagccttgcatcccagggatgaagcccacttgatcatggtgcataagctttttgatgtgctgctggattcgttttgccagtattttattgaggatttttgcatcaatgttcatcaaggatattggtgatattggtctaaaattctcttttttggttgtgtctctgcccggctttggtatcagaatgatgctggcctcataaaatgagttagggaggattccctctttttctattgattggaatagtttcagaaggaatggtaccagttcctccttgtacctctggtagaattcggctgtgaatccatctggtcctggactctttttgcttggtaaggtattgattattgccacaacttcagatcctgttattggtctattcagagattcaacttcttcctggtttagtcttgggagagtgtatgtgtcaaggaatttatccatttcttctagattttctagtttatttgcgtagaggtgtttgtagtattctctgatggtagtttgtatttctgtgggatcggtggtgatatcccctttatcattttttattgtgtctatttgattcttctctctttttttctttattagtcttgctagcggtctatcaattttgttgatcctttcaaaaaaccagctcctggattcactaattttttgaagggttttttgtgtctctatttccttcagttctgctctgattttagttatttcttgccttctactagcttttgaatgtgtttgctcttgcttttctagttcttttaattgtgatgttagggtgtcaatttttgatctctcctgctttctcttgtaggcatttagtgctataaatttccctctacacactgctttgaatgtgtcccagagattctggtatgttgtgtctttgttctcgttggtttcaaagaacatctttatttctgccttcatttcgttacgtacccagtagtcattcaggagcaggttgttcagtttccatgtaggtgagcggttttgagtgagattcttaatcctgagttctagtttgattgcactgtggtctgagagatagtttgttataatttctgttcttttacctttgctgaggagagctttacttccaagtatgtggtcaattttggaataggtgtggtgtggtgctgaaaaaaatgtatattctgttgatttggggtggagagttctgtagatgtctattaggtctgcttggtgcagagctgagttcaattcctgggtatccttgttgactttctgtctcgttgatctgtctaatgttgacagtggggtgttaaagtctcccattattaatgtgtgggagtctaagtctctttgtaggtcactcaggacttgctttatgaatctgggtgctcctgtattgggtgcatatatatttaggatagttagctctttttgttgaattgatccctttaccattatgtaatggccttctttgtctcttttgatctttgttggtttaaagtctgttttatcagagactaggattgcaacccctgcctttttttgttttccctttgcttggtagatcttcctccatccttttattttgagcctatgtgtgtctctgcacgtgagatgggtttcttgaatacagcacactgatgggtcttgactcttgccaatttgccagtctgtgtcttttaattggagcatttagtccatttacatttaaagttaatagtgttatgtgtgaatttgatcctgtcattatgatgttagctggtcattttgctcgttagttgatgcagtttcttcctagtctggatggtctttacattttggcatgattttgcagcagctggtactggttgttcctttccatgtttagcgcttccttcagaagctcttttagggcaggcctggtggttacaaaatctctcagcatttgcttgtctataaagtattttatttctccttcacttatgaagcttagtttggctggatatgaaattctgggttgaaaattcttttctttaagaatgttgaatattggcccccactctcttctggcttgtagggtttctgccgagagatccgctgttagtctgatgggcttccctttgagggtaacccgacctttctctctggctgcccttaacattttttccttcatttcaactttggtgaatctgacacttatgtgtcttggagttgctcttctcgaggagtatctttgtggcattctctgtatttcctgaatctgaacgttggcctgccttgcgagatttgggaaattctcctggataatatcctgcagagtgttttccaacttggttccattctccccatcactttcaggtataccaatcagaggtagattttgtcttttcacatagtcccatatttcttggaggctttgctcgtttctttttattcttttttctctaaacttcccttctcgcttcatttcattcatttcatcttccattactgataccctttcttccagttgattgcatcggctcctgaggcttctgcattcttcacgtagttctcgagccttggttttcagctccatcagctcctttaagcacttctctgtattggttattctagttatacattcttctaaatttttttcaaagttttcaacttctttgcctttggtttgaatttcctcccatagctcagagtaatttgatcgtctgaagccttcttctctcagctcgtcaaagtcattctccgtccagctttgttctgttgctggtgaggagctgcgttcctttgcaggaggagaggcgctctgctttttagagtttccattttttctgttctgttttttccctatctttgtggttttatctacttttggtctttgatgatggtgatgtacagatgggtttttggtgtggatgtcctttctgtttgttagttttccttctaacagacaggaccctcagctgcaggtctgttggaataccctgcagtgtgaggtgtcagtatgcccctgctggagggtgcctcccagttaggctggtcgggggtcaggggtcagggacccacttgaggaggcagtctgcccgttctcagatctccagctgcgtcctgggagaaccactgctctcttcgaagctgtcagacagggacatttaagtccgcagaggttactgctgtctttttgtttgtctgtgccctgcccccagaggtggagcctacagaggcaggcaggcctccttgagctgtggtgggctccacccagttcaagcttccctgctgctttgtttacctaagcaagcctgggcaatggtgggcgcccctcccccagcctcgctgccgccttgcagtttgatctcagactgctgtgctagcaatcagcgagactccttggagtaggaccctcggagccaggtgcggcatgtaatctcgtggtgcgccattttttaagcccgtcggaaaagcgcagtattcgggtgggtgtgaccctattctccaggtgccgtccatcacccctttctttgattaggaaagggaactccctgaccccttgcgcttcccgagtcaggcaatgtctcgccctgctttggctcgtgcacggtgcgcgcacccactgacctgcgcccactgtctggcactccctagtgagatgaaccccgtacctcagatggaaatgcagaaatcacctgtcttctgtgtcgtcaggctgagagctgtagactggagctgttcctattcggccctcttggctcctccctcaagaaggttacaaagaatcccttctctcttttcttccttctctctctctctttctccctttctctctttctctgtttcttgatggggtctcactctgtagccttgtctggagtgtagtggcctggtctcagctcactgcaacttctgcctcctgggctcaaataatcctcctgcctcagcatccagcgtagctgtgactggaggtatacaccaccatgcctggcgaatttttgtatattttgtagaggcagggtttctccacattgtccatgctggtcttgaactcctgggctcaagtgatctgcctgcctggatctcccaaattgccggggttataggcatgagccactgcatccagctgcaactatttttcaatgcttagccaagtagagttacattgttattttctttttcttgtacttttttccacaaagccaatcaaaattctataataataacaaatattattttccaaatgctcagatagttcagatgatctcccaactccttcctcaagtcctctcttcaaaagtatgcttgaaaggtaaatgttttgtatcctcacttctctgaaaatacaattatcctacccttatatttcgttgattggctgggtatgatgtctaagttaaaaatcatttttcctccaaaatttgaatacattgatttggcttcttctgcttgtcagtgctgctgttgggaaagccagtgacatttcaattttccttattttgtttttgggtttggtttgattttcttcgttggaagcattcaagttcttctcttttatccctgaaattctgaaatttcatgtttcttctttttctaatactcattgcctgggtactgcacagatatttcagtctggagtttgatgtctttttatctgataaaatttattctagtgctttttggataacttctatccattttaccagttatctttctcaaacttttgttagtaagatatgagacttctcagatggattcttttatttttttttttaaatctcttttttctatctctgattttttttttctttttttaggtcatttctcctacttcatcataaaactattttattgatttgtttttatattagcttttatttttatttcctaagacatttattttcatagcatcctgttttactttcatgagtgcaatattgttccatctctctgaggatatttattctagttttagacattttcttcaattatctgctttgcttctttttcttctgaatcctctgtttgtaggttttgttacctcagactgagggcttaaaaaattgtatctgagcacccaggccatctcttcatattttagtgtgaggcactgaaaggtgatcagcagctctatgtgagtggcgggggctgattgatgaatgggtgccattgttgggtggtgagatggcaagatgatcagtgcactgaagttagtatccagatatcttttctcagatgccttacaatttttaaggagaaaatttctctaatcactgaattttatttattcatttggtgggagcatgctccatcccctacttcccagaactgtgcttttgagttccagtgacaaagaagctcatgtagcccctccagagacatgaaaattgtggccatttctcaaagtcagtgtctactcctctcttcaaaaatgtgtacagacctcttgtatgctgagtattcctcccagtgctctttgtccaggggtagtttacaccttttctcttctttattgtcattgcaatgggattccaaaaagcagcaaagagaaacatgtttgagtcagagctttgagtgtaggtgacattggtggtaaaagtccatctccctgaagaatgactagcactaggagcagtgaccaccgtaataactgatggacttcaatgcaggattcagtttgtgttgggatagggcagcatgggggaattcctttcctgccagtgtgacagtcagggtagattctggaatcgtttatggtgggttcggcttaaagacagagagacagtctcagagaacccaggccatggtcatcctgaagaaagggtagcatgcaccttgtgtggaaggtcagctcctcttgggggtccatgctttgcctttacagctaatagagtctccagaatcaaccagtcaactcacacctgtaggaaacacataggcagctgctctctctgatatgtgtattcactcattctcaaacctcctgactctaaagtggggaaatgtttcagctttctggggcctgtggctgtgaaaaataaaatgtacacatgcatttggagggtctaggaaagttaccactgttcattgaggacctgctgtgcacaggcatagcactggggattccacagaggtaaattcttcttcgtaatggattttgatcgcctccgaggaagatgggagataactagagctgtccttaaggatatgcagggtagtatcttaaaaaatgagaaattgcagtttctgaatacattgtttgcaaataggttgagagacaaccaggaaatgaagactaatacgttagctcttttcgtattgcatggagaaggcaccatccaagtctaatgtatccctgccctggcctctgaaagctgaataatgtgtcacagattcagagaattttgttgccgtaagggaccccagaggttctagcaaaatgccgccttttgtagatcctgctgcagaggagctattgtgctgcacggtctccctcacaccattagtgtcaaacctccgtcaatatttaaacattcattattcagaatttcatttctctgcttctcttttttttttaaactctgagaaggaaagaaaaacacggttagcaactgtatcctgtatttcttcaggaaagaaatgagccacttcaaagctgagctgatttactggataaatatatatttaggcatttggggactttaaatgtgtatgatttaccagagaaacagggggcatccttcagaatccactatgcaaagatatattgacacaatttcaactgtatggttatgtctctgataaatcagcctgcctccctcagaccttcatggtccactggagataaaatatgcacctcccgttcagggagggcaaggggcaggcagacttcaaagtacagctgggtctgccttggaggatctcacagggaaaggtcctgtgcagcaccagaggcttgatctgggaatcacgtgtgagggctgcaggctcttgactgtgcatctgtaaacagtttctgactgctctgagaggcaggtgctgtctgcctgggggaggattagaggctgaaaacccatgcaggaaactggacaggtggattgtggtgaattgatagctaaatcttgcactttagtgcctagacaagattcggtctcaagtcacagccgcagggactctggacaagtcctgccatgtggctgtgcctggggtgccctgccaaggcagctgtcatggcttccagaagcaggcactttctaaggtccccagctggaggcctatgaatgctcaagcaggtgggggccccagactgtagctgacttgtaagtgcaacactttattgcctgggagccttttgaaaccttcctgggtgtagaccctacaggatagcctctgcctgtaggacctgaataggatgcacagccagaggaaggaggacgatggacaaggaggctgtcatctggagctgaagaaggatacagagaaaccttgagtatgaaaggcggagaagaaagctgagtgctcacatgctacccaggctggagtaatcttcttgtagtgcactccttcctactgccagctcatagtcatttctcaggccagcttcctccgttgctacattccaatctcatgcttctaactcagtggggttttggagtcacatggccttagcctggggttctgctgcccacacgaagtggggatgggttgtgccaaacaactcccctacttccttctcctgtcctgcatccatcgctccttggggaggctgcaccaaaacctgccatcacccctgcttaggggtctagtttccgttgtccacaggacttcaccttcagcctttttccactgaaagaaactggcttctacccacagagttgagattttgttgcctacttccacagagggagaaggtagacttgcttgggggaaaaaagaacattctcttattccaagccagtatttccaataattacatgcaatggtaaatggaattgggaaaagtgaattacctttaattaaggagtcttttatacttaaagtacatcctagggagcacatccctgggtaattagaggaggaggctgaaatctagcgtgttctgttttggggcttggaatcccaccaggaccctcctgctcatcagcacagtccctctcatactcattttcatgggtctggcatctgtttctgggaaatgctggacagctggagacctactgtccactggccttgaggtactactccagcatctcctgccactgcacatatacttgcatgatgcattagtcatataccattccatagcatatgagcttgtggcagggtcaggtgactggcccatgtggagggctgtctgtaacatgccagcactgctataccaccaaaaagacaagtttggtccatagggtagttggctcatgggatttgccgaagcatctggtctagccaggtccccaggtttgaagaaaagaggggcataagtgtatggaaatcctctttggagctaacattcatttatctatctctccattcatttttccttccatccactcgtctctccatccattcactatttccacatacatccacttagtactctccagtggctgccaggctttagtctaaatactgaggacagagaggtaagaagccgcttctgaccccaggagcctatggttgggtgggaagacagaggaggccgttggcataggtagcacagcaaggccgttgagacgctatctctggaggactagagcctcaggcccatatcataactactcggggagggtgatgccagagaggactgaggccagtgcaaccaagcagctgggggttgcttgaattggacagggagaaaatcaatcagggaagtggtggaattggcatatacccatccaaaccggtcaggatggaggaggcaggcctgcatggcctgtgaggtcagctgacccctcactgttttcccattctgtgttgtctttgccatgtgggtgctctgcagtgtataggctactgtgccctgagactgagagagatgggtacctgcaggcttgcacagttcaagtgttgctgtcttctacattaacttcacccttcagacctgtggagggtcctcctaactcagccaccatgaaagtgtgactgatgggtgtcctggccttcatcttcttctgaaccgttgtataagcatgggataggttccttaacctctgtgatcagtcaggtcctatgtctatttaggatatttctagaatatctagcagctaggtcagctaggtccacaggcagctaggtcaggaaacccaaatatggaagctgcatcttgatctgtggacggtagcactggactgatgtgactgggtttcagggctgcagaggtttacaaaagtgagcagtggggcttgatgagcagtcctgatgtggctattaggacagctttctgctctcctgattgattgattcgggcagccaagtgtcaggccaagtgggcaggaccagagcaatggggtggtaaatagactaccgagaagatagatggattgttgttctttaatcaggcattctctcaagacatggggaacatcttgacctgggatatcgccaccctcatcccaggcccagtaatgagagaattagcacatgctgaagagctagagtaactgctcaggcttggaagcaaaatagagggttttctgtgcagcaaatcactttgaaactaaatctccttactccagatgcactctgaaaatgaaaagtctgttctttgtttcaaatctccaagagacaggaagaatactgggatcagactgtggcctctggggaggatttgatagaatgctccctggtcttggccttgaaaactggaggaggttcaaatcctcagggagacgtcccttgaggacaaatgctttgtacaggaaagcactcgttagatatgtactggagaaaatgactggttttgcatgaatttggcttttaaaggtcactagcattagctcccaacataaaaccgttggaagggatttagaaatcacatagaccaagtccatttgacagaaggggaaactggggtccagagagtttaggtgacttgcctatgaccagggacaccattgatttaccatctatctccccaccgcccatcagtgatgctttctgtataatgatagaaaaggagtaaatgaaccagctaaaagtttgcactgtatctcagattcactttggataaaagtcttattactgaacaagccaagaggtacaagattgaaatgtggattttacatttcctggaggtttcatgatttctgcattgagtgggtacaattaatctatgttctttgagtggtgaattttattaaaccaggttttctctgcctcctcagacactgactggttaaatgacttataaaataaacttgcaggaattctgcagttagtgttagaattggtgtgccccatattaggctctacccttttcttatcacagtcattgtttacctaccagatctcccaacctaagagccgcaggaacatgtgggcttatcacagagctcgggtgtgtccccttcctgcaagtatgcttctcccactatcctcaccagagtaaggtgtgaggggcaagttagccatttgtagctccagtgaacagtccaagctccactggggtagcctccctaagtcctgcttatataacatgtgtgagtttacttttcacccgtggtggggtaggaatgacagaaaattctttgacacatatccaaagaagagatggtgcccatttctcctccctttgaatctgggctgggctgtgattattttgactaatggactgtggcaaaagtaacactttacccgttccgagtcttgcctttaacagcatgtgctgcttcctctttggtcagttcgtgccctgagtaaacatgtaagtcctgctcctctgcaagaggggagtacatagagaatccctgaaacttcagggagagagagataggcccagtctggcagctgaccctgtcaaggtgccaggctgctgagttggaccattttggctccttgaggccccctatgtccggaattggtgggttcttggtctcactgacttcaagaatgaagccgcggaccctcgcggtgagtgttacagctcttaaggtggcgcgtctggagtctgtcccttctgatattcagatgtgttcggagtttcttccttctggtgggttcgtggtctcgctggctcaggagtgaagctgcagaccttcgcggtgagtgttacagctcataaaagcagcgtggacccaaagagtgagcagtagcaagatttattgcaaagagcgaaagaacaaagcttccacagtgtggaaggggaccccagcgggttgccaatgctggctccagcagcctgcttttattctcttatctggccccacccacatcctgctgattggtagagccgagtggcctgttttgtcacggcgctgattggtgcgtttacaatccctgagctagatacaaaggttctctatgtccccatcagattagttagatacagagtttcgacacacaggttctccaaggccccaccagagcagctagatacagagtgtcgattggtgcattcacaaaccttgagctaaacacagggtgctgattggtgtgtttacaaagcttgagctagatacagagtgccgattggtgtatttacaatccctgagctagacataaaggttctccacgtcctcaccagagcagctagatagagagtgtcgattggtgcactcacaaaccttgagctaaacacagggtgctgattggtgtatttacaatccctgagctagatataaagactctccacgtccccaccagactcaggagcccagctggcttcacctagtggatcccgcactggggctgcaggtggagctgcctgccagtcctgcaccgtgcgctcgcattcctcatcccttgggtggtcgatgggactgggcgccgtggagtagggggtggtgctcccgtcggggaggctcgggctgcacaggagcccacggagtgggtgggaggctcaggcatggtgggctgcaggtcccgagccctgccccgcgggaaggcagctaaggcccggcgagaaatcgagcacagcgccagtgggccggcactgctggtggactcagtacaccctccgcagccactggcccggctgctaagtccccccttgctcggggccagcagggctggctggctgcttcgagtgcggggcccaccaagcccatgcccacccggaactcaagctggcccgcaagcgccgcacgcagccccggttcccgctcgtgcctctccctgcaagctgagggagtgggctccagccttggccagcccagaaaggggctcccacagtgcagtgggggggctgaagggctcctcaaatgccaccaaagtgggagcccaggcaggggaggtgccgagagcaagcgagggctctgaggactgccagcatgctgtcacctctcacccccagccaccaactgaatacattgagggactgtagtccctgccacatggagcaggagaattcctctgccaattaccaacctctgtctgaattcctgacctgcaaaatctttgtagataacaaaaatttgagtttggagtcaagtttcttgggtttaaatccacactctgccacttacttgctgtgtgttctcaggcaaatgctgttcatctctgaaacttgattccaccatccatatctggggtaataatactttcctttcaggagattcgagatacatacactataatgtggtataaagggcctggcatgtagtaagtgtgcaataagcccaagctgatctttggaattttctcagccacccagaattctatcaggcaggggtgtcttaggaatagctccccacatgcagtgtgacatcctcagagcagcctggcttgtcctcttggggacctgcagcattgggagggatgggccatgcagagacacagagccctggggctggggggcatttggtaaaacaggcccagccctgacctgcaggagtgtgggactgaccctggatttgtagatgagacacacctgtgtccacatgcgtgtttgtgtgcccttgcacagacatgtgcacacatcaaagggaaggagaaggagctgctgttgaggatgttcagcccaataaacatggctgtgaggggtcctgaagccaggggttgtgagaactcagggaatcatgtcatagccctggcaggtcactgctctgcccggcctcaaagatactgcaagagaaagctctttctaaactgtaaagcattctatgtgtgcaaggtattattcttaatagcgtgacaaggaggaggaggagatagaggaagtggatgaggagaaatccgcctgaatcctcctgataacaattttacatctataattccttccccttcctaccacatcggaattttatgggggattagtgagcgtccagctgcagaaggcctggagccccttaggataaggctcagctaggactttatttaatgaatccccttagaggggattttcttttgtggtggaaagttccctgctggtaaaggatatattccaccacctggggcctcttccctgggctcctgtaaaccagaagagcagggatgcatccgctctgcagtgtgtagtggtgggcgtgctagccaacatactgagaactttcagcctgctattctattttctctcttcttgtttttgcctcagagagaatagctcccagtgctttcaaccccccagccttcccccaaaccataatgtggtactccctggagttcacttgtctggctcagtaccactgggatgctgggaggcacagtgtctggggggccttctgtgacccgtggaaatgtgagctgtgatgctggtgttcatggccttcctgtaaagatacctcctcacatggagttcctcaaatgcaggtattccaactacacttgtgcaaagaaccccatggtctcactctctcctgacagccctgagcaggttcacccctatgaaaatgaaaaggaaggtccagactgctgagtactatgggcaagaaggtagagacttgaagcctaagatttgagaccccaaataggatagggttgctagctaaaatataggatgccaagttagatttgaattttagataaacaatgaatgcttttttagtataagtacgtccctgttttagtcattttgggctgctgtaacagaataccacagactgtgtaatttataataaacaaaaatttgttgactcatggttctgaaggctgggaagtttaagattgagggcccacatctggggagggccttcttgctgcgtcatcccatggtggaaagcagatgggcaaagagagggcacctgcacacatgagagagagagagacagagagcacacaaaagaggggattgaactcctgctttcatttatttattttctgagacagggtctcactctgtcacctagggtggagtacagtggcatgaccatggctcactgcagccccgatctcctgggcagtcctcccacctcagccacctgagtagctgagactacaggcctgcaccactatgccagctaattttttaaatatctttttgtagagatgaagttttgccatattgcccaggctggactcgaactcttggactcaaatgatccaactgcctcagcttctcaaagtgttggtgctatggtatgagccaccatacccggcctcatctttttatagggaacccacttctgtgataatatccttaatctgttcatgagggcagagcccttatagcctaatcacctctcatttggccccacttctcaacactgttacattgggaattacatttctaaaatatgcttttcaggagacacatgcaaaccatagcagtctcaaatggatttttcacaaagaacagtattttagtgtaagtatgacccacaaaatatttaggacatacatatatgagtatatgaaaaaaaaattcactgttttgtgtgaaattccagctcaactgagtgtcctatatttttatttgctaaatccagcaaccaccctgctgaggagggctgcccctcctgcagtgctggtggtctgggtcttgcttattgagctgagtttgttgagtttgcaaggcagccttcactgggctgattgtttcctcttgaaaaattcacttgcactgaggttggtgactctaggtaggtaaggtgctgccttattatctggtctgtccaaacagcaagctcattatccaactgatcacaggaaaattctcgtgactcatactctaagacctcttcctaaaacatgtatgtatttatttattttttattttttattttttttgagacagagtctccgtctgtcgcccaggctggagtgcagtggcgcaatctcggctcactgcaacctccacctcccaggttcaagtgattcttgtgcctcagtctcccgagtagctgggactacaggcatacgccaccatacctcgctaattttttgtatttttagtagagacaagtttcgccacattgctatggctagtcttgaactcctgagctcaagcaatccacctgcctcagattcccaaagagctgagatgacaggtgtgagccattgtgcctggctcttaaagtatttaaacagctccctatatcaaactgcaaatgccagagtattgaatttaaggaagtccactcctaggattttattttcttgtggatatcttacacacatatcaaataataaataataataataatagtaataataataataataatgtgtgatatctgagcccctaaatacagtttggtacttttctctgtaatcttctatctgttagaaagccaggttcaggcttaatcaacgctggaattggggtctccatcattcccaaatctcaatttcagagtgagaagccctctatgagaaaggtctgtgggcccgatgccttcctgggatggaagcctggagtgaagtctctccccagcttcagctcttctctcttcctccctatacctttccataccatcttctctgctttgactatcaaggagcaggcctcactgacctccctgtcaggtaatcacctgtctctgtgtctggtttgtgactgcctgaggattccttgcacctggtgctccctccacataaggtccggctccatcctgatacagacgttcctaagatatattcctttagcggaagactcttgcatccatagaaatgcagctgcctcttccacggatgacaccttcacaaattctttcccacgttagtgcttgggaaggaagaagcaggacagaagctgacctgcctattccctgaagcctggaggtaagaggtcaatgaaggagaggcactgagatcaggccatgttggcctctcagtgatcttcacacagccctgccatggagcctcctgaagactccactctttgcaggtctgaatgtcagggctgggctaatgagagaacaaataggacaggcactgattagcaggcagagtttgtataatcaattccagaaccatacatttatcagaaaatggattctaattaaaactaaatttggctcacttacaaatcactaacttaaggggaataaaaagatttgcctctgtttattgcagcttgccaggatgtgaaggggcagacatttctgtatatgtcacaagcatagtgggagaatcctgatgctttgtggggagtctggtggctgcattgttactgtagcagataaaggaaatggaagtcatcagaaggcaagaccatctcctgagggtttgcaagtgtcgccaagccatgctttcctggcagggagtggctctgcctacatctgccctgagggaccagtccctgtgggtaaaggccagtatccagccctcagcaagcagagcaatttcagctcttctttgcagcacattgtgtgctgctgactagtgtgctgcaaagaagagaggttaagaacaccagcttcatggtcagccagaaccagttcataatcccaattctgcttacttatttttgactgtttaatacggagcccactgcttcacctctttaggtcttagtttcctggccttaaatggaggcaaaattatgcttgtttcatagggttgttggaaagattaaacaagataccataggcaaaggtctcagcacaatgtctattcttgagcaaatgcttaataaatgacactgattgttcttagaaaatatattaactaggtctttaatatcctaacatatttggttgtttttaaagcggtgtcttaaaagctaaaataagctgcctactcatttcgagtacatgtgagtattcctagctgatgcattatagtatagaaatgttttttccaattttttttcttccatagttttaccttttgtattttctttgtttgaggcttttaatgttttcaggcatctcagaatcaaggctgagtatgaacaagataggttccggagatgcctgagaagtgccgagtaatttaatgctgctgtagcatagtggtggtcaaaatgtgcccacagacccctgggagatcctgtcagggtgatctacaagttcagaactattttcacaataacacttagagatgccattgcctgtttcggtgcattgacatttgtgtggatggtgtgaaagcattgatgggtaaagctttgttctgtctggctatgaaaccagtattgcaatgacaccaaaatgcactagtagtcattgttatcctttacaccagtcactgaaaaaaaagaaaaagaaaaagaaaaagaaagcaaattttgctgaagaatgtctttgataaactagtaaggttagtgtttgattaagtctttatccttgaatccttttgacattctgtgtgataaaatgataagttcaaataaaatacttttgctgcatactgtggtatcatagttgttgcaaggacaagcactcgtgtgattgagttgcaagctgaactagccaattcttttcatggaatattatttttcctgaaataacaataaacatacacaagctgtgggtattcagacttggatatttggaggatattttcttgaaaatgaaaggagtgagtttatcactccaaagcagacaactgaaagtgtttgttgcaaatgattaaatttgagttttcaagtgaaaattggagctttgggaaacttgacagcttcccactatttaagagttgatattaatgaatatgggttttcccatattcattatttcccaatgtatgatgtgaccaaatcaagccagaggtaaaagttccattggaagttcaaaatagataaatgtattttaatgcaatattaatgcaaaactttcattgactaggtttaagattccacactgcaacttaactttttgagttttggtgtagtagcaaagaatattcccaattatctgaaagagctattacagtttgtttccgtttttcaactacatatgtatttaagatgaattttcttcatgtaatttaacgaaaataacatattacatcaggctcagtctggaagcaaaagtgaggctatagctgtcttctactgaaccaggcatgaagagatttgcaatgctgtaaaacccagttttctcgctgttttatgaaaatagttatttttcataaaaatatgttctctgtgttaatatgtaatgagtttattattggagtctgataattttcaagagtgaaaagagccatgagaccaaaaaagtttgagaactgctgctctagcaagtgctttgttctttctaaactatagctcttgctacgttgtattgtcattgtcgcatgtgagcttctattactagctggtcacacaagctccttgaggatctcttcttctttttgtttgtatccatatcaaccagcacagggcagtatatgtttggtaaatatttaatgaatgggataatgcatgtttgatcgtcttaacatctataaaaattcctcttggcctacaggattacctgaaataatatcaggtttcaacagagactctactgtacaagagacctggttcccatttacatctaccccttggtgtctgtgtgtttgggcaagttatacaatttctagtctaaaatattaatccttcaattgagaaatacaaattccccagtcccaggcgagactaattaagtcagaaattctgggggtggggccgagcaatctgtgtcttaacaagctctccaggtgattctgatgtcccctaaagtttgagaacttctgtgcatcttttattctcctctaacatgggaaatataacccttactctgtgaagttacttgcagattacatgagataacacacataaaatgcttagtgacaatgcctgaacactcgataagcagtacctattcttattgtaaaaggcaaggaaacacagactattttttattttactgaactctttccttgcccacagccacagccccttgttcacattctgtggccctgagcttgatgtaatgagtctgactgagttggagagagtagagggacccaggaagctgaggaggatagtgtgtggccaaggccccgaggcttatgttttcttctctccttgatgaaagcctgttgaccattagcccggcaggttcacttctcctacatagtgagggacagcgcacaacagtccaatgaactcaaaaaaggccctgatggagggagagagaggaaaagaagtgacagcttacagagaggtcaagagaggagaaatgctgggcaaattagagcaagtaacctttgcagatggcagctggggaaacagaaggtgagaaactgtcattccaaattgcaactttcacaaggagaatgaatcagtaccttggcagacaggtgcctgagtttcccagtgtcatactctccagcctggcttctcagaggacccattcccgtgaccctgttaaaggtccattggcatctgcaggtcttcttgttaattggaaaagcatcgaactgcacagccagcaaaagcccattgaggattcagggcctctgcaggactgactgacctattaactgcttccctgcctgcagctctcagctttatgtactcagaggtccccgaggctgtgtgctttctctgtagtgcattgattctctcattcatctactccgtttattcattcattcactcattcatttctctgtttatttgtttcttcccttaacaaacatttacttacacccttgtgacagtttctttttactgtaggccagtgcttctagaacagaagcagttttccatccttcccttttgagatatttggccatgtctggagacattttggttgtcaaaactggagagtatattgacaaatggtggagatgatgctgttacacaccttaaatgcacaggacagcccctccccctacaacaaatagttatgtgaccccaaatgtcaatagtgtcaaggttgagaaaccctgccatagatgaaagatggacatttgtgggttacaaagggattgaataggcaatggagagagcagatattgaccacactggcaagatgggcagtgaagagctagagacagtggagtgatggctcaaaaaggaagcacagggaaactgaagggtgctctaagagtcagtggagggcaagggtggaggtgctgggaaggaggagggaagggaatcctcccttagtcccttttctgtctgagtctctttcaagtcttaaaaaaaatactctttttttttttttctttttctttctttcttttttctttttttttttttttttttttttgagatagggtctcactcttccaggctggagtgcagtggcaccatcaccaacatcatggcttactgcagcctcgacctcctgggcttgggtgattctcccacctcagcctccccagtagctgggactatgggtgtgtgccaccatgcctgcctgttttttgtaattttactagacatggggtttcagcatattgcccaggctggtcttgaacttctggcctcaagcagtctgcctgcctaggcctcccaaagtgctgggattacaggcatgagtcattgcatccttccaaaaatactcccctcttgccaaggtcccataaattagatttgaagcagatgtcatgaagcattagggagcagagtagccaagtcatcaccacacctgcccctcgtgcacgcacatgctggcatctagccacatctggcatgcagtgggcaccatgttcctgggtctacctccatactagggctgagtggactttgctaaagggccactgtgtcttctgcttcttccagctttgtgcctcatcctatgagtgtctgtttcaggagatgttagaacaactcaaatgcccaaccaatagtcagttaattcctgcttgcttcatctgtgggctttgttgctaagcacacattgctggtgtgtgtgaggatctgtagagctgggagttctagcccctgtggatgcttccttacagcctcagaagtgggctatctattaccctatagaaggtgcctttggccatcacagtccactggcttttttgggatctaagtggagccgcctattctgcaaacactgccttctgtttccttcttccccgccactgggctgcatccatcattgagcaggtgagttagagagatgccttgccattgagattttttgctgtctttaaaagcacctccttgcctgaatatttgaatcaaattacatctttaagccacttaatgtgttctgatgatctattgtctaacaaacgcattggctaaaaacaacgttaatcatgtcattatttctcacggttctgagagtttgctgggctcagctaggcacttcttgctcaccttcttttgtgcaattgcagtcagatgatggctgaggctggggtcgtcacaaaggcttcttcactcacagatctgatggttgatggtggcatcaactgagaactcagctggggctatctttcagaatacctgcacctgtcctctccctgtgacctgggctccctcacagcatggtggctggatttcaaaatggagcatcccaagagacaggaattgaatgccaccagtttcttaaggccttggcctagaaactggcataccatagcttccattatattaggttggttaaccatttacagaacccagatttaagagaggaggcatagaccccacttctggaaaggaggagtatcaggtactttggggaccaggttttgatacctctttataatatgtgatcagagaagtcctgagcaccaattttgagttggtttctatgtgaggacacaggtgacgaaaccaggcctcctgtccatgaggaacgcacagcttgtggactaacttctggacctgtgaagtctgtgctctgagtgtttttcctgttggaaacatgagatagggcaaaagctggctggtccctgatgttgctctcctttatgcttccagtggtaccccgggaccctgaggagccccaccctgggcatggtgcctgcctcctcttacctttttgtcttcacagccaaggcattttatttgaagtttaaggtcatgtgcagtttgtttcctgttgctggcatccaaattgatataaatcattgactaaaggcaagttagaggaaatgatatagagatacattcaagacagcatgtatacatgactaatatggatggccgattgaggggatcttctaggattagattacacatgattttgctttatttgatgactttagatcctaaccttttgagttagacgtgactctcttgaaaatgtaatgaccacctacagccactgttattctgtaaaagtcaccttgatccccatgccccaaatggtaaggacataatgtacagcatagttctttaaattaaaataaacttatatgtttaaaaaatatattgcatttgtcatatttttgccatcatattgcaacactgacaagtgttgtgggcattgtcttcctggtgctcatcctcttcgtgtgggaaggtgagtggcttttgattaccagggcctggtttctgctttttgctgctttgggcatgataaggtttggatgttttgtcccctccaaatctcatgttgaaatgtgacttccaatgttggaggtgggcctaataggaggtgttttcgtcatggggctggatcccttttgaatggcttggtgctgtccccatggtaataagtgagtcctcactctgagttcaggtgagctctggttgtttaaaagaatgtggcacctcccccatgctctcttgcttcctctctcgccatatgacacgcctcctcccctttcaccttctgccaggatttggtaagcttcctgaggcctcaccagaagcagattgcagtaccatgcttcctgtacagcctgcagaatcatgagccaactaaacaccctttgtgtgtgtgtgtgtgtgtgtgtgtgtgtgtgtgtttaagaacggaggtttaatagacaaaagaaagagaaaggagaatagctccttctcctgcagagagagaggggcacccaagtgggtcttccctaaacctccttttttaaaatataaattacccagcattaggtatttccttatggcaacacaagcaaaccaacacaggaccttgcctcatttcgtgagtatttgcctcagatccactggtagtagctaatagaataattcaaatgtccagccacccatgatatctaagagtccttctatcccttactttctggggctctgttatcttacctttgagaactgctataaggaagggaaataagaaatccaacaagctagattggcagggtcatttcattctagcccacctttgctctgggcctgggtgctgaccaccttccaaagtttattttttctttgaaaacttaaagcaagacaaaggcaccaaggtgattatttcctaataataaatcccccaaactgcttcctatcactctattaataacttattccttgaaggtttcctctctgaaatttaggaatggctcaagcaagctgtcatccttctaaatggtttctgatcatagcttcaagattgattagtaactgctctcctatttctccccacctggaggcatctttgagagcaacatgctgaaaagatgacaacagcaggacctaaggaattcataaatggctttgactgcgtgggttttgatgaggcaatatggaaaatgattgcattaagtattgctatttatttacttgactttgtacaggacaatcaattttttcacgttccatgcctcctgtcaggaagttaaacggcagagaaggcagactggaggcattacctcatttctctaagagatgctgtcactcctcaaatcaccttagaatgttgttaataacagcatctttcattcctatccactgagggagtagagattctcccttcacaaagaaaggacactgaggaaggcgagatatgaccaggaaaagatgagctaattttttcatgaactatataaaaatctacttctgtaggtcaattattggcaattttatataggtaacccaataatgtaacacatgactttgtcagtataatgttaatctgtcctaggaaagcaagatttggctctatttgagcatttagagaaaaaattccagacccttgtagagaaagctggtcaatgtttagccttggtcagagcagatatcaaactggagttatataaagagatatgggtcagaggctgaactggacccattgaatgaacttgatggaacagtgaatgcatttctggtgtgtgtcgattgaatattttggggaattctggaaaattgatcagaatgattgatggctcctttaagatggtctcttgagtttgaatatcaagctctggaaatcaggctcctgggttagaagaaaaggctggttagagaaagagaaaaaggaaacaatgtttgctttttatttaagaggtgaagtgtggaagagggaagctgcttagtcatgaggtttgaatttgagtttaggctctgacagcactgtggccaagtcatggtgtctccaaggatcagctttctttctcataaagaaaccttataaaaatataaatggccaagcgcagtggctcacacctgtaatcccagcactttgggaggccgaggcgggcggatcacgaggtcaggagctcacgaccatcctggctaacacggtgagaccccatctgtactaaaaatacaaaaaattagccgggcgtgttggctggcacctgtagtcccagctactcgggaggctgaggcaggagaatggcgtgaacccgggaggcggagcttgcagtgagccaagatcatgccactgcactccagcctgggcgacacagcgagactccgtctcaaaaaaaaaaaaaaaaaaaaaaaaaaaaaaatatatatatatatatatatgtgtgtgtgtgtgtgtgtgtgtatatatgtgtgtatatatatatatgtgtgtatatatatgtgtatatatatgtgtgtgtatatatatgtgtgtgtatatatatgtgtgtgtgtgtgtatatatatatatatatatatatatataaagttggtgtgttggttaatataatgtgtcaccttgggagtccatggtatccagatatttgttcaaacattatgttagatgtttagattttagatgtttctaggaaggtattttttagataagattaacatttaaaaaaaagtctcaacacgtagaaatgataaatactcaaggtgatggatacccccaaatatcctgacttgatcatcacacactctatgcatctaacaaaatatcatatggagcccataaatatgtaacatactatatattattctttttaaaaaggaaggagaagaaaacagtttggcagttactcaataagttaaatatatagtcaccataagaaaaattggaaactttatgagaccttttgggaactggtttaaggtgagatttttaatgtggaggtttaattagaatggtaaggatcaggatgtaacagtgtaagactggcaacacagcaagatgaagattttgagatgaggtctttgaggggagtcttagcatatcaatagttgtttgatgctctctgtatatgcatcttttgttttcttgggcaattgtttcctgacatagcagtcatgttgatgaaaatatagtggcaagtgaagagatgctatatgaagatggtcaaatagtaaagttaagctgggcatggtggctcacgcctgtaatccctgcactttggggggctgaggtagcaagaccacttgaggtcagaagtttgagaacagcccaagcaacatagtgagaccagtccctgcaaaaaagaattttttcaaaaatatctgggtgtggtggcacgtgcctatagtcctagctacttgggaggctaaggcgggaggatagtttgagcccacgagttcaaggccgcagtaagctatgattgcttcactgcactctagcttgggtgacagaatgagatcctgtctctaaatatatatacatgtgcatatgtgtgtctgcatatatatatatatatacacacacacacacacacacacacacacacatagcattatttatatgacaaatttatatcatataattaccaaaatattgacattaaaattagattttaaagcagattatcccccataatgtagatgggcctcatccaatcagttgaaagcctcaaattaagttacaaaaaagactccaaaaaacaaagtttacctcctccaaggaagaggaattctgccagcagacttcctttggacttgaactgtaactcttccctgggtcttcagcctgccagcctactgtgcagattttggacttgccagtccccacacttgcatgagccaattctttatatatatatattcctttatccagctgtatttttcaggagatatatatatcaaagttcagagaactctgagtaaatgcttagaaaggggcgctgtatgctgaacgtctcacttcactctgcccttgtaggcctcagatagcatcactcaggggtgaaggaggcaactgtccagagcacagagcacagccagctaacccccccattattgttgtatcaatagccgtgcttatctgtggggcacctcagacttcttgcagcaccagctagcacggatgttagctcataggatcttcacagatttattataaaagatttatattgtggacatatttattgctattttttccagacacaacacagtttccacaaatattacgtattcattccttataaactcaaatttattatagacttagcttttttgcctctgcatgggttttatccctttcctttctatgtgttatcctcaccttaaaagtgcttcctccaaaggcctgcatttgtccttacacttccttcccttataccacctatgctttcatttttgttcaaatttttaaaaatttagtatgaaattaacagatgcctactgtcaaaaatttgaaaagtgagacataatgaagaagtaggcaaaatagtacccataattctattaatattttggtctatttactttaacttgtagcctctttatccagtttactatcattttgtacccaacaatctattctaaacattttgatattaaaaaaatcaagaaccttatttttaatgtctgcccatttggcggtctacctttgggtataatatcatttgctaaacggttcctataatgttggacatttggtttgtatctgtttttcaaaaaatgattatgcataacacttcaaagaacatattgtccttaaatctcagtctgccttttgggttaaatatttaggaaagacactcgatcataacaccggctcacatctctcaggccctcccgtgggccagcccctgtctgtgctgagagctgtgcctgtgcttgcccaggtgttcctagcagttgtcttaacagaactcataccatgatccccattttttcagatgagaacaccaaggtacaggaagataaggtggttggcccttgtccacaatggccatcagctaaaaagcagcagagctctttgaacctgggcagtctgctcctgacacacgtcaccactcactaggttgagggcctgggcatcttccaaggcttcccatacagatcaccaagttgctttctaaaaggtagtcctggtaagtccctgtcctgagcgaacctgtcttgtcatccttgttcacacccggggttgttgtgggaggatgaacagggtcacacgtgtcaagtcgcaacacaagcctggcacttggtaggtgcccacaaaagacagctgctgtcatttctagggtgaaggctgtcaccacacaggtctgagtatgggctcatcttcatggcctttaggaaggctctttcctactctctgtatctgtgcaccttcctgtcctgtgaccagaggacagggaagcaggaaacacaacagtgtttacctgggctctcttccacctgggggcttccctcacaccaccctctgttctggcccagaactcttccctgacttcctccatcttagcactgatggcccacctatcagaccacttactcacaggagaagaaagactgtccatttctgagtccaggctgtcagttaccaagttattgtactgtcagttagcctgcacaccagtgtggaacatcgggcttctttcagcagatccagagctttctgcctgcaaagcccccatagggctggtggctaccactgtgcatgaagaaggtaaggctcccttctgtggagctggtgctctgggaacctgctcaccctccgtggcctcctctgcctgccaggccgcatcatctctccgtcaggctgcgtcatctctccatgtgcttgacacacccttcccctgttcgggcagagcagccgtgctgggctctcttgggatacacccttctcagcaggtgtttgaactctctagagcctctaaaagggcctgtcacaggcaaagctgatgtgatgctctctgttttacccttgaagcaacagattccctagaagggccagcactggcatggagactcactcaggtggtgctgactgtgccctagggcacttctgagcaaaggcaggcccacaaccaggcaaatgttagatagcaacatcaaatccagaactcagagaaagaagttaaattcatctctctattctactgcagtctcattagatttccaatagatttcatgcttccaaatgtattttccacacaaagatgcttggggtttcttggagccctcgcagacgagacaggtgggagggaggagtggctgtgtggtaggaggctgggctctgggagtagggacacttgtaagcagagcctgaggtgtaggggaggcatccaggcggtgagccccaagggctgccatgctgggagaagattcttacccaagtgcgtgttattcagggcacctgctcctccccagctcagctcatcacccacctacgtagaatgaaaggacatctgttatgcagagtggcagtatggagagtcccctctgggcctgctcagtgaacacccccctaataaatttgttgctggattcagacctcaagcacatcacagccacattcttcctgctgcctctgctcccagaatctggtgaggagggggctggggaaggagcctgggcaagccaaggcttcatggttgcaaagatgagctccagatgccatgttcagcccaggatatctttagagagtgtctttcccagcaggagtccccggataatgaaggcttataggagaaagagaagaagtcacaggcctgatgaaagggatggagaggagactccatgggaggagacctgtgattcctcagtgtccaccactgaggccagctggctcattccatattctgctctctggacagcagcacttgcctctcttctcttctttttcctttcccactttctttcctctcattattctcttcttcttccccagtggaagggccagggtctctgctgggttcttcccatctgtgatgctcactgatgtccacttgtcctgccttcttccctctctatagagtcaggcagtctgggttctggctcccttgccccgctcctcagaggggtcctgtcccttttatctccagtgctttggctactctcacttttttgcaggttctctgagtatggtggccatattttccaatctcgatgtcagattccttgacttgtgtgcacatatgtcataggtatgtgtatacatacaaggtacatatactgcatacatatgtgtacatatatctgtatgatacatgaaagcgtgtcctatgttgcatttactgaaagtctcagaaaacctagccagcgggattgagcctccacctgctcaggccattgtgggagcctttgtcttttaggttggcttcattttagctcccttagtttaagcgagtttatttttctctctcaactggaaaatcacatttgatcagctgtagacagcagtcagatactgaaacattgggattttgcccagaaggcaacccctgtaaagctggcgtgggttctctgaggcaagatgggaccaacagggagacacatacagactgaggggccatgagtcaggtggactgcggacagatacagatggggagacaggaatgagactggaataaagccaaactgtgctgagcactggagccatgagcttctgggtttgggatggtgcattctgtctgcctcactgtctccctcattcctctgctctagtcacagttgatgaatgtggcagagggtgaatcagagcactaatatttgacccatctgctatgggacatgctgtgaatgggaatggcggcccgcctggcaggtggtgagctctgcccacctctcctctcctgtcccttccctgctacgaatgggcccctgtacatcctggggaggaggagggccaggccacaataggggctgtatatctagcttgtctttaccaccattccagatctcaaggttactgctctcctgctgctgtataaaaggtctccacattgtcactgggtctctgtccacataaacctcttgggtacacacctcagtccacaatcctgagggtgctcccattcaaccttctcatcctatcttcatgggcaagttcaaagtctttaaaaacacttcacttgctaacatccccagcatgtgaagctttacctgttccttcaacattgactgttccctgcagtacagctggggcccagtcagagcatcctctgctccacagagctcttctgcctccggctacatggggattctgcagaaagggattcatgttcatacagatgagcggcttgtaggtgggtttcttccctgcagggctcctccaacattttcttattacggtgtactttttaagtcaccaatggagggtttagtatgaaccctttcctaaccttaatttgccataggaagattttattctcagaacactcaatgacacctcacagaatacaatttggagaaggggttttggagaaaacaactggtttttaaactactcactcaagcttgtgaaaatcaagtgtgacagatattatcaaataaatcatatcagcaaatatttctcatgtgtcttctatgtacagcatatcaagttgatccccgatgtgcagcagattcttctgtacagattctattctgtggtaaaactggggaacttatgttccccttctcaacaagtttacttctgaagtagaaaaaattttactacagaaggagccctttctgggtgaaacacaattatttactgcttcacagctactaagctggcatttggaattcaggtgtcactgagagtgcctgagtaccatgttatctggaatattatgacatgggtcacttttctcctggagggttggtccctggcggctcaccccattacaggaaggtcttccaatttgccattacttgaggagtgaactcccacctgcttgaaacaactcaagaaggggtgagagaaagaggggagggagagggggagggaaaggcaggagaatgattacatggagagtggaatgtgaggcaaccagtgggagctttgggaagcaattgttgctgggtctcccaccttgactgttggagttcgttgactgtgatgggtacagggtttttacctgtttcaggtgtggtggatatttgcttaataatgggatttgatgcaggtggtgattatttggacacaacaaagtatacatttcattccaaatagcatcccagggtcttaaactcctggggaacttgaacaggccctgagacacccagaggttggagatatgggttctgactccagttctgccaccactaatgcgtgacctttggcgtgtccccatggcccgtttgggcctcagcgtgccgatgtaagagatgagaatccatctgggccactgatgctcagatacagtgcctgcaggagcccagccagcactgtagattagcaaagagaaccagagtcaaggccagggaagggatgagtgcacaagtgtgttcatcttctatttctgaaagaacagacaatattgaaatatatttaacgtactgtaaaattcactctgtaaattgctttttagtattatccacaaagctgcgcaatcattaccgtgatcttattacaaaacatttcttcaaccccgaaagaaagccatgcttgttaacaatcacacgacatttccagctcccctcagccctggtgaccattgatccactttctgtccttatggatttgcctactctggacattttatataaatggaatcacacagtatgtaatcttttgtgactggccttgttcacttagcatatgtgtttaagattgtctatgtcgtagcatgtgtcagtactttattcctttctgtgactgaataatatttgattgtatggatataccacattttgtttatccattcatcagtagatgggcttttgggttatttctattttttggctattacaaataatgctactacaagtatttatgtataactttttgtaaggacatatgtttttaattttgtttggtatatacctaggattggaatttctgggtcacatgtgaactcaatgtttaagtatttgaagcattatcagacagttttttttatgatagcattctttttaaaacttttttatttttaatttttgtgggtacatagtaggtgtattatttatgggatacatgagatgtttgatagaggcatacagtgcataataaacataccatggagaatggggtatccattccctcaagcatttcatttatcctttgtgttataaacaatccagttacactgttttagttatttttaaatatacaattaaattgttattgactattgtcaccctgtcttgctatcaaacagtaggtcttattcattctttctatttttttttttgtacccattcaccatccctacctcctcccaacaccctcactacccctcccagcctctggtaaccatccttctactctctttgtccatgagttcaattgttttgtttttagatccccaaataaatgagaatatgtgatatttgtctttctgtttctggcttatctcacttaacataatgatctccagttccatccaagttgttgcaaatgattggatctcatttaaaaaaaaatttccataggttattggagtacaggtggtgtttggttacatgagaaagttcttcagtggtgatttgtgagattttggtgcacccatcacctgagcagtatacacggcatcctatttgtagccttttatctcttgtcccctcccacctttacccacaagtccccaaagtccgttgtatcattcttatgcttttgtgtcctcatagcttagctcccacttaggaatgaccaccccccccgacccaagtccccaaagtccattgcatcattcttatgcttttgcatcctcatggcttagctcccacttatgagtgagaacatacaatgtttggttttccattcctgagttacttcgcgtagaataatagtctccagtctcatctaggtcactacgaatgctgttaattcattccttttttatggctgagtagtattccatcatatatatttagcacagtttcttttttttttaattatactttaagttttagggtacatgtgcacaacatgcaggttagttacatatgtatacatgttccatgtgggtgtgctgcacccattaacttgtcatttaacattaggtatatctcctaatgctatccctccccactccccccacaccacaacaggccctggtgtgtgatgttccccttcctgtgtccatgtgttctcattgttcaattcccacctatgagtgagaacatgcggtgtttggttttttgtccttgcgatagtttgctgcgaatgatggtttccagcttcatccatgtccctacaaaggacatgaactcatcattttttatggctgcatagtattccatggtgtgtatgtgccatattttcttaacccagtctatcattgttggacatttgggttggttccaagtctttgctattgtgaatagtgctgcaataaacatacatgtatttagcacagtttctttgtccactcgttgatgggcatttgggctggttccatatctttgcaattgtgaattgtgctgctttaaacatgcatgtgtgagaatctttttcatataatgacttcttttccttggggtagatatccagtagtgggattgctggatcaaatggtagttctacttttagttatttaaggaatctccacactatttttcatagtggctgtactagtttacattcccaccagcagtgtagaagtgttccctgatcaccacatccacgccaacatctaccattttttaattttttgattatggccattattgcaggagtaaagtggtgttgcactgtggttttgatttgcatttccctgatcattagtgatgctgagcattttttcatatgtttattggccatttgtatatttcttttgagaattgtctattcatgtccttagcccactttttgatggggtttttttttcttgctgatttgtttgagtttgttgtagattctggatgttagtcctttgtcagatgtatagattgtgaagactttttcccactctgtgggctgtctgtttactctgctgactgtttcttttgctgtgcaaagttctttagtttaattaagtcccagctatttatctttgttttcattgcatttgcttttgggttcttggtcatgaaatctttgcctaagccaatgtctagaagggtttttccaatgttatcttccaggatttttatagtttcaggtcttggatttaagtccttaatccatcttgagttgatttttgtgtaaagtgacagatgaggatccagcttcattctcctatatgtggttagccaaatatcccaggatgatttgttgaaaagggtgtcctttcctcactttatgtttttgtttgctttgttgaagatcagttggctctaagtattttggtttatttctgggttctcttttgtgttccattggtctatgtgcctatttttataacagtaccatgctgttttggtgactgtaaccttatagtatagtttgaaatcaggtcgtatgatgcctccagatttgttctttttgcttagtcttgctttgggtatgtgggctcttttttggatccatatgaattttagaattgttttttctaattctgtgaagaatgttggaggtattttgatgaggattgtgttaaatttgtagattgcctttggcaatatggtcattttgacaatattgattcttcccatccatgagcatgggatgtgtttccatttgtttgtgtcatctgtgatttctttcagcagtgttctgttgttttccttgtagaggtctttcacctccttggttatgtatactcctaagtattttatttgattttttgcagctattgtaaaagggattgaattcttgatttgattctccgcttggttgctgttggtgtagagaagagctaacgatttgtgtacactaatcttgtatccagaaactttgctgaattcttttatcagttctagaagctttctagagaagtcttcagggtttttgaggtaaataattgtatcatcagcaaacagtgacagtttgactttttctttacctatttggatgctttttatttctttctcttgtctgattgctctggctagaacttctagtactgtgttgaagaggagtggtgagagtgggcatccttgtcttgttccagttctcagagggaatgctttcaatttttccccattcactattatgttggctgtgggtttgtcatacatagatggcttttattacattgaggtgtgtcccttgtatgctgattttgctgagagttttaatcataaagagatgctggattttttcgaatgcattttctgcatctattgagatgattatgtggtttttgtttttaattctgtttatgtggtgtattacatttattgacttgtgtatgttaaaccatccctatgtccctggtatgaaacccacttaatcacagtggattatctttttgatatgttgttggattcagttagctagtattttgttaagaattttagcatgtatgttcatcacggatattaatctgtagttttcttatttggttatgtcctttcttggctttggtattagggtgatgccagtttcatagaatgaattagggagggttccaccttttctatcttgtggaaggaatagtgtcaaaaggattggtaccaatccttctttgaatggctggtagaattctgctgtgaatctgtctggtcctgggcttttttgttgttggtaatttttaaattaccatttcaatattgctgcttgttattggcctgtttagggtatctaattcttcctgatttaagctaggagggttgtgtttttccaggaatttatccatttcttctaggttttcgaatttacatgcataaatgtgttcatagtagcctcaaatgatcttttgtatttctgtgatgtcagttgtaacatctcttgtttcatttctcattgaggttatttggattatctctctccttttcatggttaatcttgctaatggtctatcaattttatttatcttttcaaaaaactactttttgtttcatttatcttttgtattttttttaaactgttgtttcaatttcatttaattctgctctgatcttggttatttcctttcctctgctgggtttgggtttagtttgttcttatttctctagttctttgaggcgtaaccttagaatgtcagtttatgctcttttagtctttctgatgtaggtatttagggctatgaactttcctcttagcactgcctttgctgtatcccagaggttttgataggttgtgtcaccattgtccttcagtttgaaacattttttaatttctatcttgattttgtttttgacccaatgctcattcaggacaggttatttaatttccatgtatttgcatggttttgagggttccttttggagttgattttgttttattccactgtggtctgagagagtgcctgatataatttcaattttcttaaatttattgaggctcattttgtggcctgtcatatggtctatcttggagaaagttccgtgcactgttgaatagaatgtgtattctgcagttgttggatggaatcttctgtatatatttattaagtccatttgctccaagtgaatagtttaaatccattgtttctttgttgactttctgtcttgatgacctgtctagtgctgtcagtggactattgaagtcccacaatattattgtgttgctctctgtctcatattttaggtctattagtaattgttttataaatttggaagctccagtgttaggtgcatatatatttaggattgtgatatttttctgttggacaaggccttttaccattatataatatccgtctttgtctttttaaagtttgttttgtctgatataagaatagctaaccctgcttgcttttggtgtcaatttgcatgaaatgcctttttccaccctttaagttttagttatatgagtctgtctgtgttaggtgagtctcttgaaggcagcagatagttggttgttgagttcttatccattctgcagttctgtatcttttaagtggagcatttagaccatttacattcaatgttagtattgagatgtgaggtaccattccatttatcatgctatttgttgcctgtgtaccttgttgtttttgctttttaaattgtacttttgttttataggttctgtgagatttatggtttaaagaggttctgttttgatatgtttccagcatttgtttcaagatttagagctccttttagcagttcttgtagtggtggcttggtagtggcaaattctctcagcatttgtttgtctgaaaaagactatatatttccttagcatatgatgcttagttttactggatacaaaattcttgggtgataattgttttgcttgaggaggctaaagatagggtcccagtcccttctagcttgtagggtttctgctgagaaatctgctgttaatctgacaggttttcctttatagcttacctggtgcttttgtctcacagctcttgagattctttcctttgtcttaactttagataacctgatggcaatgtgcctaggcaatgatctttttgcaatgaatttcccaggtgttctttgagctgcttgtagttggatgtctaggtctctagcaaggctgggaatgttttcctcaattatttccccaaatatgttttccaaatgtttagattcctcttcttcctcaggaacaccaattattctcaggttttgttgtttaacaaaatcccaaacttcttggaggctttgttcatgttttcttattcctttttctttgtctttgttggattgggttaattcaaagaccttgtcttcaagctctgaatttcttctacttgttcagttctactgctgagagtttccagagcattttgcatttctataagtgtgtccaatgtttcctgaagttttgattgttttttctttatgctgtgtatttcctcaaatatttctcccttcacttcttgtatcattttttggatttccttgcactgggcctcgcctttctctggtgcctcttggattagcataataactaacctcctgaattctttttcaggtaaatcagggatttcttctcggtttggatccattgagctagtgtgattttttctggaggtgttaaaggaccttattttgtcatattaccagagttggttttctggtttcttctcatttgagtaggctctgtcagagggaaagggctgaaggctgttattcagattcttttgtcccacagtgtgttcccttgatgtagtactctcccccttttcctgtggatgtggcttcctgagagccaggctgcagtgattgttacctctcttctgggtctagacacccagcaagtctaccaggctctgggctgttactgggggttgtctgcacagagtcctgtgatgtgaactgtccatgagtctctcagccgtggataccagcacctgttctggtggaggtggcaggggggtgaaatggactctgtgagggttcttagctttggtggtttaatgttctatttttgtgctggttggcctactgccaggaggtggtgctttcaagagagcatcagctgtggtagtatggagaggcaccagcgtggggaagggggtgcctagaactcccaagagtacatgccctttgtcttcagctaccagagtgggtagggaagggcaatgaggtggaggcagggctaggcatgtctgagctcagaccctccttgggcgtgtcttgctgtggctgctgtgggggatgggggtgagattttcaggttaatggagttgtgtacctaggaggattatggctgcctctgctgagtcatgcaggttgtcagggaagtgggggagagctggcagtcacaggcctcacctagctcccatgcaatctgaagggcctgtctcactcccaccatccccctctaacagcacggagtcagtttccaggcagtgggcaaggagggctaagaacttgccccaggctacctgcctcccagctgaaaagggctttagttcttcccctgcctgtggagtctgcatgccagattcgcaccctcccctgagttctggccaggaggcttctgaacaagttcatattgttacaaagttcagctggagacttccttctccctgtggcattttcccagtgcctctggctgccctcctgagggatccctgtggtgccaggcaggaatttcctgcttggggaacccagtgggctcccagagcctttctcgcagcttcctctacccctgtatttcgctcggctctctaaattgactcagctccaggtaaggtcggaatcttctcccataagctagaccttcagtttccccagtagtaggggtgtgttcagggtcagaggatcccactgcaagtgggagatccctttcccacttcggcagtttgggcactcacagtatttggggtgtctcccagttcctgcaggagcaggtcacttccttcagagggtctgtgtgtcctctcgggattcctggtttattcctgcagtcattctggagctaaaattcatgatgcaagcctccatccgctgctctgtctgtccaagacagagctgcgatctagccctgcctcccatctgccatgatgatcgggaaccaatccaaactgtttttcaaagtggctataccattttacattccagcaatgtatgaagatttaattctctacatcctcaccaatacttgttaatatctgtctttttttattatagccttccctgtaggtatgaagtgatattgtggtttcaatttgcatttccttagttattaatgatgttgagcatcttttcatgtgtttactggggctgttgggattatctgttctatttctttacccatttttaaattggtttgtttttttattgttgttgtaagtgttctttatatattctggatactattgtcttgtcagatatatgatttacatatattttctaccattttatgagttgtattttcacgttattgatagtggtttttgaggcacagaagtttttaatttttttttttttgtttttgagactgagtcttgctctgtcacccaggttggagtgcagtggcgcaatctctgctcactgcaagctccacttcccaggttcgcgccattctcctgcctcagcctcctgagtagctgggactacaggtgcctgccaccacacctgactaattttttgtatttttagtagagacggggtttcaccgcgttagccaggatggtctcaatctcctgacctcgtgatctgcccgccccggcctcccaaagtgctggatcaggtaatggggcttcttagatatgacaccaaagcacaagcaacacaaaggaataataggtaaactgggtttcatcaaaattaaaaacttttggccgggcgtgagccactgtgcccagccaaaagtttttaattttgatgaaacccagtttacctattattcctttgtgttgcttgtgttttggtgtcatatctaagaagccgcattacctgatccaaggtcacaaatatttatgcttatgatttttaaattttttttatagttttagcttttttcatttagctcttttatccattttgagttaatttttgtattgcgctctcttaagtaatcaattcaattaaaaacaaaacaaaacctctgagttgggtcaaatcaaataggcacatgggtcaccagttttgcaagttctgagcaggggatttcatagtgctctctgctactcttctgtcaggcttacagtcttttttgagttattggggagtaacccaggccccaaggaagacagtttggaacaagacttaccgtagtagtaggtactgatgggagctgtcctagggcaggcaaatatgctggctcccctgatgagaaaggccatatgaagatgaatgtgcttgcaagccggcttcacagctgggtgaggccttaccaggtgggattgaaactgatcccaggttctgggggtttcaggcctggcatgctcacctatacatatccttccagagcccaagtgctgccctggtttctggagatctggatccccttgctagtttactataaccagctttgtgatcacaggccactcactgaaccactttgagctttcagtacttgctctgaagcttgacatcaataaccttgtgttcaaattttgatgatcacttgagtcccaccaatacatgattaaaaaaaaaagctagaatggtttgattatggcagcatcaagtagtgtttccccaaatgtttgccattgaaatgagagaaaatgtacttgtttggtcaaataactgacactcactaaatcaaatacaaacagatgtctttactgcaggacttttcagagcctttctgggaacacatagcctgaatctatagaagggggatgtgctatgcagcttccacagtgtttaactgtggaagagttattgtaaaaattgaattctttccatttcaaacactgcaaatgaaaccaccatcatggaatggagctggactttcatctgtgtgtgatgttgtgtgggtcacaatccacgttatccaacctgatacacagagttatgcctcctagagcttcacgctctgttgctgcctaaaaaagtccataaagttggcctaggttatggagagggactctggtcctgtaaggctttccagtcttcactccaggtgggtctgacattcagggctgcctgcattcctctgttgggcagcaatgaaactctgtgaaaccctagagtttacttgacctgctttagaccattggggcttgatcatgtcagaggtagaaagccagggtgcctctagacttacgcaccagcattacttggagtactgaccactataaactggccagaactgtgaaactgagcgctggtgtttgggaatgagtcccaggttcaaggaagtaagaaagggacttgcaaggccactgtgcaaaatgacctttcttttttcatcagttcagggcatttgcttattattatgaggagtttgggatggggtaggtaataatcataatgaaggaaaaaataatacacagtaacaatttaattaatttatacttcattaataattttataatgtatcctttttgcattctatttaacttctaggttttagacattttaagacaaatgtttcattgttttgcattcctaaagttaagtgttgagagttatgtgatggatggtagggtcagaatgagtatcgggcataggagagaaagctctgtaactgcaacaagtagatgcaaagggagatcagatcataagctcttattctgcacatagtaaaaaatgatgtgcatggtcaagtgttcattatactacagcgtcactctggccagggagggtcagatgggtggtctctctggtctgtgttcctcctcctcaacctggaagcttttatggaatgagcaaactatcctcaaatactgtccccctcaaggactaaggagatccatccagccagtcttcctttgctgatctgatttcactctgctatggcacaaggcttttaaactttcaacaatgtagaaggctttgctggtagaaccactaaggagacccaggttccacacactgatttcctttgtgctgggatgcaaaggtgaaaccatacaatctctactcctgggaatatcaggggagactggacccaggtaattttaagtttaggctgagagcagtaagatctcagaaaaagacaggtacagatttgggagctcaaaggaggcaaagatcatttccagctaatgtgagaggtagaaagtctctgtaagacaaaaacaaacgtaggagttgaatatgctgcactggggaaaggatttaggtggcttcttctgagagctcctgaaggcaagctgcagttatgtgatgagataaagtgctggactaggatgtgtgaagtcttacattgtgggccctggggatagaaaatttaaagcaatttgacattctttctgctccagcaccatttcctttgaagttctgggggacctccccttagtgctttattttgatgatgagtgaaaaaactcatggctctaaatgtcatctgtacactaatgactccaaaatttacatctccatcccagacctgagctccagacatacactcacctgctgacttgacatctccccctgggtggctaatagacatttccatctgagtgcatcccacactgaactcttgatttcctttttcactttgattgctcccaactttttaccatctcaataaatatcaccaccacagatccagttgctgaatgaagaaaagttaggccattcttgattcctctgctcaacatctttgccagccctgcccccagtcccccagcacattatttcacctctatctccagaataagttccagctgccatgtctgttcttgccttctacagaccactccacacagcaggcagatgaatggcttaaaaaatgcaagtagggccaggtgtgatggctcacacttgtaatcccagctctttgggagacccagtcaggtgggtcacctgaggcccaaggtcaggagttcaagaccagcctggccaacatggtgaaaccccatctctactaaaaatacaaaaaattagctgagtgtggtggcgtgagcactagtaatcccagctattcaggaggctgagacaggagaaacgcttgaacctaggagggggaggctgcagtgagccaagatcacgccactgcactccagcctgggtgacagagtgagactccatctcaaaaacaaacaaacactcaagtaaaacagccactttcctctttaagcccccgcagtgacttatttcacttataatgaaatcaaattttttaccagccctctggaacctgactccgttctgctctccaatggtagctccttccagtctgcccagtctctgagctgcagccacagcagacttcccgccgatccccaccaccagcctcactcctgcctgggggcctttgcacatgtcactgcctcagggcctttgcacatgtcacttcctctgcctcaaaagctatttcctgattctttttgtggctggctctgaccttgctgtctggcacgccctctcttctccatctttgttaccacattttatcctgttttacttgctataaagtgaatccatatatgaaaccttcttgtgcagttgtttatttattgtttgtctcatctttcttcttttctatcactggaatggaagctccatgagagtgttgctcttttttcttcttgatctgttttgcttgatttgagttggcccctacattttccagttgatcagagggggtacccatttattctaagtctcatcatgagttcatagatttaaacatacttcatgcgtttcaaccaagtaaatatttgtttaatgaatgggacattgaataaatgcaagttaagaactttctataggctctcaggttttttttttcttttcagactttatagtaccagattttatatgaaaaatcattgtatgatttttttctagggttaattctactatttgagtattttcttagtactctggggttttattgaataaacaacataggccctgcttttatggatacttttatccatctgctactgaacacaacagttttaattagatcttgaattattttattatcaaaacctgctgttgcatcctctgcacctgtcacctagtaagagttcacaaaagtatttttaacatatttataatggaaaatttcaagcacatgcaaaagtagagagagttgtatagcaaactcacttttacccatcattcagcttcaacaattgtcaaaccaagaccaatctggctttaactaattccttatgttgaagcaaattcaagacatcctatcattttatcagtaaatatttcagagcatatctctaagagataagaattcttcagagtaaataaccgtaataccattatcacatctaagcaaatttataataatctctgaatatcatcaaatatgcagagagtgttcaaaatttcctgaatgtctctgtctttctctctttttttttaagtttatttgaatcaggctaagaagttccttaaactgcagtgggtttattatctctttttagtctcttttaatctatagttttccccctttctttttttttcttgaaatctgtttgtttaagaaaccatgttgtttgtcctatggagcgttccatagtctgagtttgctcgttgcattccagtggtggtgtttagcgtgttcctctgtcctctgcaatttctgtaaatgggaagtaaaaaagtttgataagattcaggcttatttatttggaaagaatacttcaacttcatattcatccatggaggcacatcttgtctgatttttctctctgtgatgttgatgttagggatgttgattctcattgtccagatccagtctttcattagggtttgcaaaatgttactattccaattctatcattctttctgcatatattaactgaaatattttataagaagaaaattgcccttatttagttatggtttgtataagaaaggcatataaatgcttgattctctgtcttgatcagttttcaaaataatgagttgttctctacattctccaattgatcagtggagtgtttaaatatcatcatgagctcatagatttaaacatacttgatgcatttcaatcaatggatatttgttgaatgaatgagaaattgaataaatgcaagtttagaattgtctctaggctttcaggtttttttttcctccactccagactttgtagtcccagattttataaggaaaaatgttgtatgattttgttctagggttaattctactgcttgatatgtccttagtaccctaggacttttactgaatgaacaacataagccttgcttttatggatacatttatccatctgctactaaacacaccattttcagttagatcttaaatatgttatcgaaacctgctgatgtgtttcccacctgggaaggtgttggtcactgatccacaggcaattgcacttacctagtcttagccccagcttctatactgtggctttgggccatcccctcccctctgggcctcagtttccccatatgaacatgtaggggtggcactatgtcattatgaaggctgtttccaatccttacattttggggagctctccttcttccatactgcatgtgacctctaagtaaaggccatgtaagcagcatcagagggggcaagcagagtatcagggtggtggggtggaaatgaggagtgagacccacaggccagggtgagagcctaccatgcacaatccaacaagcagctcaaaaggacccctcgctgtaatacacctatcattgcctgtgtggtttttctttaataactttctggagtttggtgggagcaggaggtgccaaccaggttaggaaagatttctgggattctctggtagtatccaaaggaggaaagactaggtgctggatacaagaagcagtttcaaagtatgagcctttaagcaggttgattggatatctgaactatccccaaccagccctgggcttccttttcagtcatctctaccacctgtcaatgttgcgctttctggaggctgaaacaaccttgccagctgccctgcccatctgagaattcagacatctagagtgccagagtctgctggcatctcccttttgtcaactgcagggttagattgcctgggaatcgatagccagaatccatgagccatctgatgagtagacctgctgctgagctgttgtctgcatatcaccctccaattacagggcccccatttccccgtctgtttcatcatgcaacccaagcacccaggtagaaggccttttgacctgttgctcccatggacctgctgaggtatcttaagatgatgaaatgtctctttcttctgcctcccacactagctgccaacagctaggagctgatgggctttgtgcttcttcaggaataagggcttggctgatgatagggtgtggtggcttatatggcatcatccacagctcttctcagtccctaggtggtagaaagaaagaagcagctggcaggaggctactatcctgcctccactccatcagactcacagttcttcttaatcactgccattgctaattcttactgagtgtggacagtggacaggccactctatgaaggaggagagatgctctttacctgcaaggggcttgcctgatggagagtcccagaaaatgtcttggcacctgtaggtaacgttagccctttctcctatttgaggcagttggggatggatgagtagatggtcagtcacatcagtggttggaaaccatcccaagagatggcttcctggtgtttatttggaagtgctgaaacaattggatatccataagcaggaaaaacaagattacctcacaccatatacaaatattaactccaaatggatcatagacctaaaaggaaaaacaaaaactataaaatttctaggaaaatgttttgaccttagggcaaagatttcttagatatgactccaaaagcacaatccataggtgaaacattggtaaattggattcgagaaaaatatttgtatatcatttatctgaaaagggatatatatatatatatatatatatataactcttaaatgcattagtaaaaagtcaaacaactcaatttaaaaatgagcaaaaatatgcatggggatttcagcaaagaagatacacaaatgatttttatacacatgaaaatatgcccaacatcattagtcagtaaggaaatgcaaattaaaaacacaatgatatactactttacactcactagaatggatataattttaaattcaaaaatggaagtcttatacaatactgctgggaatgtaaaattgtacagctgctttggaaaacagtttggcagtttcttaagttaattataagtttaccatatgacccagcaattccactcctcagatttttactcaagagaatgaaaacatatgtccatgaagtgacttgcatgcagatattcacagcagcattattcataatagccaaaaggtggaaaccatccaaatgtttatcaactggtgaatggataaacaaaatgtggtatatccatacaatggaatattgttcatcagtaaaaaggaatgaaatactgacacacattacactatggatgaatgccaaaacattgtgctaagttattgaagccagatttttgaaaatgttgaatgagtcctagaaatgtccagaaatgacaaatccacagaaacagaaagtagataagtggttgcctagaattagggggtaggagcagttatggggcctgagggacatttacggggtggtagacatgctctaaaatttaattgtggtgagaactctacaaatttaccaagaatcattgaactcataaatttactcaaattcattgaataatttacaatgaattttatgatatgttaattatacctccataaaactgcttaagataaaaaagaaagaaagagaagtagattccagaatgtattttgccaaaggaaccatggacagggagagaaggggagagtgggctttggaccccgtgggacaagtctcagcctccagggaaggctgcaggccactggtgtgaggacctgccattcccttctgcaggagtggcagtcttgggcagcatcagcttacaatatcctgctcccaggtttgttctctctttctcacccacatatctgggaccattcctgctctctgaacccctcagccaccatgcctttgacttgcagtcacagacttgcccctctccctgctctgatgtcagccgtccctctcacccactctgtttttctgaagcctaggtcctctgatgagcatgccctgctttctagtgtacatcactgggccatggatggctgggcttagagttgttgggagatggtctcaaacctaggtaggaggaagacgtggtagaagcagcttactgaacagagaagggtggggtagcaggagctgaaggaacaacatgtgggacatgggtggaggggaaacataaagaccctgagatgcatacatggcacatcctggtgctacaggagggactagagccgacccatgaaggcccattccagggccacaacccaatgactggaagtaggaagctcaggagctgcagaggcatttgtggttgactttgctggattttgagaatcaagacacactttgctcccctcacatctcccataccagaaggttgatctttgccattggtttagttatttacttccatgtataaacagccctaattttggagcccttattatgtggaagactctatagaaagcatgtgatagcattgatttgtttaatcttcacaaaatcttttgaagtaggtgctattattaccactccattttgcagatgatggaactgcagcccagagagtaaagtcagttattcaaagtttgagattcaatcacagttatctcagttcctgcattcccccaggttcctgctcaagggtagatttgatggggtaagaggccaggctcttaaaggcccagtgtgagaagacttcaggccttcagacaagtgtatccactgtgcctggcagggggaggagtatggaaaggagtaagagaagaagctgatatctcctccctcagaagagagggatgggtcttcccaaggaggtgttctgagaccccaaggggcctgaggctgcctgtctgctggagggagaggaaccatgctgggcagggcaccccaagcccaaaccccagccccagatgccaagaaagaccagctgcatacccagatcctacattagtaatgtgcagacaggtagaagcctgggccagcaggtctgtccaccctcttgcgccctctgccctgaacactgcaaaactaccaccttctctggccacagcgaaatgggtgggatcttttgaaagaatgatctgtaagacctatgtgctgatggacaaatggacagagaaaggcattgccagcacaatctgtgaaagagagaggaagagggagtatgggagctggcacatgctgtgcccagagaaacctagtcatgcatctttcttagggatcatagcaaagagcggcctgggcctaaaaaattccagtgacaaaggaatctcaaaattccaaagaaattttaacatctctcatatgccttgatattcaacctgcactttttgtgcacgtactatgtgcctagcttcctggacagagaactttgcgtagaacttggcaggctcatgccctttgctgagtcctctttccttttctctggtttctataactgtagtaacctcattgggaggtcattgggataagagttcttgtgagcagacagcacaatgctccaatatccagcacccagcattacagtgttaagcccaaatagttctgggttaggagtgtatcagaaatcatggacatacgtaaaaacaagcaaaaaaaaaacaaaacaaacaaacaagcaaaaacccccaaaaaccaaagaaacactaaacagttacccatgatcgcatcttctcagaggattaatgcctctcttgggcttagacagtaataacccagaaggctagaatgagttgatcatggggcgttgagtctacagagtgatggtgacatatttctgggcctatgcctacatccaaatggataaccatgcctgcattcagtgggtgccatatgaggagacttctgccttcattcaaacaaaatatatgcccgtttatccaattgaggcccatacccttcctcaaaaaggggctcatgcctcaatttaaatggagcccatgcctccatccaactggttcttgtagagacttctgcctgctgttgctgccacagatcccctgaccccatcagtgcaaacactctgaaaggctctgctctaaaacctggtttgggagtaggcctccataagcacgtcacctccttgagcccaaccatcatcacatagtggagtcctgccgtcctgagctccctcgtggcagctctccttctctttctcttcagcttgattgttattccaaaggcctcgttatggaaattacaaaataatggttctgcaatttgtgagtgtgtggttgtatgtatgctaattatcattcctgggtaccctgtctcagaggcactgcagaggaatccagagacgtggctctctcttcactgtagctttgctgttctccccttccctgcctcccttcaccccagctatctccattctctaatgcatgggggcaactggagtgttgagtagacatggccatcccaagtccattttctgtgtccagcggggtacctggaacttaggagtgcccctggctggacgaagaggtgtgacagtgcatctctgtagcaagtgcactgttttaacagagatcctgtttgtttgaggtggctttagtcaataatgagggatgggctaatgttccacacttcttgggattgtcactgtagcaacgctgcctccctggcctgcgcacttctccctagctgttacttgtaagattgggaaagggagaaaggggagagaggaatctcctggggaagcgaggtattcctgcaaagcctggtccaggtgtgatgcactctgcagggcaaaatcatgggctcagaatgaggcttcacagaggaggtagagtgtgcccaagggcaagatttcagaagggaaaaagtagggccagagagaagggggaggggtgcaggaggagaaattctgccccaaaccaaaactcttatggttaaggacaaggttaatcagattcttttgaaagggaattgtttctggggtaagtgaaaccttcttaatgataaagggtgaattgctccagtcagattacccctggggacacttgggggtggggcaaaggtagcatcgtcagaggtccaagattgaatagtctgaggagagagtggtcctggaggagaggggggacagcaggtgtgagaggggttcagagactggggtggtggcagtgggacaatttgacatctttaggatttgagtgctgttgagaatgggtggaagtcatggcaggaagcttcaaaacacaccttccctgtactttgatcaggcttgggtgagctacttaacctctctgtagcttgggtcctgcatctgtgaaatggtataataatagcacctacctcatagtctagtgggagaatccaacatgacaatatggctaagcccttagcgcagtgcccacccagagcaagtccttgcccatgatgattattcactgttattattgtgcactgctattgtgttgttttgagagttgagtgatataattcctgtacagcctctagcacagtgcttggaacttaaccactgaatattcaccactgcctgttgcttttacattcagcctcttccagttcagacaggcatcctctattgcaaatctccatcctatctccatctagagacacgaggagaatcaggtgaaggaggggaggggaggtggaagaaggaggaggttagctcagggttctaccttaccttctcctctatcatcaccagagcatgtggagtctttgaggaatttcatagtcttggtacctttgaatatgttcctcacaagttctcagaatgtgtggcttaagtctttggggataattattttaagctactttagaaaaaaaacctgtgtattaaccatatgtatggagggtggagggtgtttatgtaaaaatattccagggttttcgagtagaatcagatttgctaaaggggcttacaaaactctcacgaggatggagagacaaaggttagcataggccactgaggacttttaggttggccactaattattagggagccagtagccagaagaccctggcagggatggtcactgcttctagtgctgaggcaagtagtacatagaaaaaacctggaggttactgcaaaatgtcatgtctgccaaaacccatgggctgctcgccactgctgcccaaggagcttctgctctcttcacctcctgtgtctggtaggagtgcttcttattggtggactgtaacccagacccctagaggctggtgttctgggaaatatggcttacatgtttccagcccctctgagcctgagaggagtataatggggctgatttgccagcggacaatccactcatgtggatgtgaccccttcaatacctaaatggcaatgatcatggatgcagagtcagggccaacatcaggagagcaagagggcacagaatgctcaccaatttgctgtgggcagaaaacacagagctgcataacttctgcagggaaagaggagaagaagaggaggagggctgtgtatgcttccctgtgaggcagatggaacggcagcaggagtggggagatccaagcagaaggcccaggctgggaggcatgaaatgcaggctcttcccagcatgagtgattggcagggtaggcaggactcagaggcttacaggaaatgtggcttgtccccagaggaccctaaaactgggtcaggactgatagaagagactggggaagccatgttccgtgggagaactgcaggggcaccacggacagacatgagagacaaagaaccattgcagatatacagtcttataattaactcagttcaacaagtacttgaaatagccacatgggctgggcaggaccttggacacagaagtgtgcaaagataaactggttacaggctgtgctctcagaagagtttcttgagagaccaaatgatgatgacgatgataacgatgatgaagaactaactcttctgagtacttgccatgcaaatcactgtacatgcattatcacattcctaatttacagatgaggatcctgagacttagaggttagtgacttgcctgtggtcaccacataagtcttgagaggatctatacctgggcttccagactccacatcctgtagggacagtgctaaggggattctggaaggagacatgccaactggaaaatgaggaatactttcatggatagggtggaatgtgagctaagctgtagagaataggacacatttcaggtttagagatgggagagaaggacaccccagatagtgagattcatgtgagcaaaatattggaacagcataagtcacatagtagggaaaagtaaaaaagagctcttgaaagtctcacttgtctagtcccaagcttccgcttatttaatacaagtccacgagtattgtctaggtactggcaggctgattcatagagtactgggggcagggagcagttttgcaggggaggcaagcaggtgagcagacagtcatacccagcatgggacgttctgtagttgaggcatgtggaagtcaagagctggcacaaagcaggaagtgcttccgtgcgaggggcctgagcaattctgcacgtggatgggaactcctcaggcagccaggcagaggaagccagaaagccatgtccagctgtgttcaccgggagccagtcttccatttgcctggaattctagatggtatttgggaggctgggacagggagagactggaaaagtgagcagggcctgatgaccccattggagcagctgtagaaagtcatgtcagggcattgggctccattgtgaaggctggtgagccctcagggttttagacaggaaagggcactgtcagatctgtgttgtgggatctctggcaggtgtacagaggagaaagcagcaggggggaaattagggagctagtgacaagaggaaggcctggctgaggcaggtacagaaagagggagatttaacaatagctcagaacgtagagatgacaggacctggtgacagttggatgtgggaagggagggagggttagggaagcaacaggctttgagacatttgccttaggctgtccacaggaaaagtccaatagacaggttgaaaatacagaagagaggatgaaggcattagggcaaggctcagatcccagcagaaatggcatgaaatgagactgagggtgagagtaaggggagtgtatggaggggggattaatttctgtcaccaggagcaccttctcccaggctgaggaggtgcaggtaggagaaggtggtgatactcccacctgctgttctcctatttttctaactggagcttttagttatgtgcgtagtatgtagaagttagtgctacatatgttaattgaggcctgcatattaaaaataatagaggccaaatgagtccattgaatcctctgtccctctcactccatccccaagctgcccagaaacacagactagttcttgagcccctggtttacatgaggctccagtctcaccctggggccccctcccttcccaggagcaggtgatgatgacagttcagtaggtgtgtttgtggtggcaggatggtgaaatcgctactgaggcagtgggtagaatctttgttggagttggctctccctctgcctgccttttcaagaatagattttttttcttttctttagctcagggatatgccaagaaaaatgaaataaaagtaaaggaaagaaagaccaaagtgtgtttaattggaatagctttttgccatgtgaaaaagcgacagtttattgcaaaatatttatcttcattatggttggtatcattattgatggagatgccctgcacgctaatgggaaaatctctccaggaggcccaaatcctgatgagctgagtctccaccttacttctgacatgctgggtgagcacatcctttaatttctgggtgcctcagctcacccacccgtacagcctagaaaagacagtgctcatggttagattagcctcgtggagctggaagaagtctttgaggtcagggcatgagaagctccttgtggcaaggactgcaccttgctggctgttgtgtcatataggtcccttgcttaacggaggtgtgcgctgactggctgcgtgatggatgaatgacagagagcgagcctgtgttaaaggaatggcagatcgatgcatctaatctaaccattcatttcacagagaaggcaattgcagtccagagaaggtgagtcacactcatttgctgcagagctggctgaggttcagctccctcattcccaggggcctctccgtggttatacccagcagctccacggtccttctattgtgagatattgtagaacatgaatgagaatgtacacttgcagttgtttttgctattcataataaaagaagcttacaaaagtcaaagtatcacttatcatgatggatgtttgataggcccagataagcagacgtaggagctgtaatgaacactaaaatcaagccttgtatgtgttcaccaataaacagcaaaggtgagggaattactcttatttaccctccttatccccatttcacagatgagttcttgctgtggctcagagaggctacaacagaacttgcccgcaacctcacaggtagcaagggtttaggaactgattctggaaactgggtattcagagtcagtattcagggtgaatttcattgacccattgctgtcttctgcaacattctgggccactggctttaataataatgacccttatctgtgcagccacgagcagacctggcctagggctcacctgtgttctccaatggctgagttagttgattaacacaaagaggcaatgagagcaaccctgactttgaggaattcctaaagggaagctaagcgtgtcttcccaagtgtattacctggtctcagaagtttatagccacaccacataaactggtgcagtgagacatttggctgttctcttggaagagacatcaagagtcatttagaactcctgcatgcaggtttctggtcggtgtcaacacatggaaagcttctggagggctgaagcctttaatgagtggttgcttccttctcccaactggaatcacccaccttggagcccaggtttactgctctgagattgtaaagatgccaaggaatggagacagcctggttttttattgtgcctgcctcagatggaatctgcctctctggacaaagatagcatcacaaatgtttgatgcgggtgtctcttcttgtcctgaggacccgggcctctcagcattgcccagtgttcctcagcacacacaaagctcacagccatgaggcagctgggccttgccctccttgcctctgtctttcccaggtgactggcatcccctgccacatgtccatctcagcatattattaacacctccttctgtctcagactgcttctcttcccccagggagtgctgtgggtttgaaatgatggtctttaatcatttcttaagtgaccagccctgaaatcatttcttagtgccatacacacaaattaaatcataaatccacagtgggctctggaaagaactgaagtgcagcccctgattaagagctgaggggaggcctccccaggagaaaggcgtcagtgtgtgcctagaggaaaggccagggccctggagagaagaaagaagcttcctactaactccctttccacagaagggcctctttgcatttctgttgttctactccacacaaaagagatatgagaggatgcagacagatatgtggggggtggtaggagggcatccatgttagggttaggaagtccgggcagccccttccaggaccgagctgccttaagaatccagaatcagccaggcccaacaggatccttaatgacctctgacggtgggatggaggaggaccagaagagtgaggaattggtaggcacacctcaagagaaactcagaagtgggggtgggggagggtgttcctgaaacatgtccatgctccctacttatttcaagactcagttcgacatcgtgccccacttcaagacttcccagcttatttggaacactcagtctctctcctcacaaacacaaagtcttctgcttgattaggttggtgatgggtatatgacaatgacactagcaagctgctaaacatccttgactctttccaccaccatgcctttatgcatgacattttctcaccctggggtgcctaccttcattttgcctacctagtaaactatgaatgcttcaaagcctgcatcagttgtcatctccaccaggaccctcactctccaaactaatatagagaggagactgcctgttctctccccacccctctatatgcttctcttttcacactcacatgctgttttataattctcatttttaacatttggttcttccactgagttttgtattctttgagaatggggactccagcttactcttctctgtaaagtcagagtggccagctcagggcttgaattcaaggagtgatgttgctgaagctgtatagtcaagtggttggagcttcacagtgaaagagctgttctctattttttgcctccagcatgctttgcttatgtaagtcactcaacttctgaattgagaatctgagtttcttctgcaaaatgagaaaaataaaaccagtacctttactattgcaaaagcctacaaagaagataaatctgagagtgggttgttgggggaatgtgtcaaaaccctttagctcctgaaaaattccattagaaagtcaaggtgttggtattgcaattattatttgattcccaaatggtgagagtgcttccagaaatgtgctttgcttgatgaaccgatacatttttagcccccactgatgaatttgggaatcgaatacctgtcatcttgaaataattgacacatcttggtgaagcacttagattcctctgatgaaagtctggattcttactgagaatgagaaggaagctgtgttacatgggagcaatattgttttatggacctttatcttagttattaacaaatgagtgttacatgtggaaatggtaaagggggaattcaataatgaagtttcataggattataatgattattagcctaatgatgatgaaatccaggtttcaatgcatgtggtttccttggcattcactgttctgtgccctttatgctgatgggcagcagcctggctgcatctgtccctaacatcccatcctgaagttatatgggaagtgggcataagtgtagtcggctcctctagcaaatctggattaggatatccatgcacaataatataattattattgtagtaattgttattgcaattagttgcccatatgtcatgcaaatagcaaaaaacttatattctagggagccgacacccactagaggtaggaagagttcgcatcagtgaatgctcactgcctgccctgctgctgagctgcccaagggtcctgtggaaaaagcagccaatctcaccagcatttacactctattcatttttctctgtgcaccagaagccactgtaaggatgaatttgcctttcagagcaggtctctgtagaatacccagcagccacatccatgcatcacgtttttacatctggtcaggaattcaggcaggcaggaactcagagggactgagagccagcatatgacatagaccatacttatttttttttctcttcctttagaggcaggaaaagtaggacaagatgccctaagtgagtagaaaagatattcatcttgtccctttcctaagcctctcgtctgaactcatgttgacttgaacatgtgactttttgagcctgagtacatatgcccatcgttacagaatgtccccacccccttagataacttaccatagtaaatagctggaaagggcatcagctgtgaagccagacagacctggtggtgaattatacctccatgacagagtagctgggaaatattgggcaaattgttttatctctgagcctcagtatcactgtcagtgaaatggaaatgctactatcttctcatatagtttcatcgaaaagaaatgttacgattacatttgtctgtaaggaacataaaaatgaaagataattgtgggttttaaaaatacagggttttttttctcatgtaaaataagtccgggttggatggcactccatggtgtgatgttggaaacccaggtgcattctacttcgttgctttgacattcttagcacacagttttcacctcatagttgaagatggctgcttgagttccaaccatcatgtctacttttcagccagcaaaaatgaggaaggatggaagaagagctaactttctcccagaagtcacataggatactacttctccttgtatccctagatcttagtgattcaagccaatactcatgcattatcaaagcttgatgggaatgtcccatatggtaggggaaaatgttgactttgaaaaatagaaaacattagcaaggtgatgacacattgtctatactcaacatattatcattttataatagaaaatattaactgctattaatacttttaattgagcagttatttcatgccagatattgtatcaaacatttatattttctatctcattcaatcatcaaaacaactctatgagacagggactaatttttacacacgaggaaactgaggcttaaaaaggttgtaggacttgctttccatggctctaagtagtagagtctgtaactgaagctggtactcctttctccaggaagttatgttggcatagttgatgtttaacataagtagttatacacaatagtttttgtttattctaggtaaatttacttggtataaaaatactccagccagtaagctatcaagtctctggagtcagcagcctgcattcaattcccaggtgtaccaccagcagtgggactttgaacaagctactggacttatttgagccttagttttttaatgtgcaaaattggaataattgtagcacttgtttcttggggctgttgtgagaataaaatgggattattctgagtaacatacctggcctgtgccacatgcttaaattcttattgttgctcttattaataaaacaattgttattaataccaacacaactttacaaccaattttaacacgtggtgggtagcttggcacatagaccttgccttggaagggtgaagtgagacacatcaggtgccgagggtaggagggcctggccatgcttctcataccagtctctcatttattaagagggctttgctggcctgaccgtaaagcctgaaaggtgagagtgggcacaggagagcaggacccttcctgggcatgagagggagcaatgtcgtgttcacctgtccagctaggctcctgtcattccttcagctctgggttcgtgtcctgctgtttgctttggggaagtcctttctcaagttgctcagcagtgcctgctgctcctttgccccattcctccctctgagccttccctgagttcctcacctgctgctccttctctaggttcttcctgacgtgctgagccttcagttcaatggcttccctaagtgtgcattgagatctaagtgctaagtgtatccttaacacctctaatctctgctgcaagcttctcccctaattgtgtttcactgacaaacctgaaggcagttggtgatactgatgttcatccaggaaactgaaaataaggaggacatagtgcactctggaaattacctctcagcacctaggaataaatgatctcaggagagaatgtgactatccaacccttcgctgcctctgttgcagtgggaggcctcacccagatgatctgatttgcaacatccactggtccattcacatgatctccagggatccagtgcctatggctggctctgctcaggtgctcaaaaggagggtgtcctccctattccagaacctgcaagccccacttctctttccaaagtctgcatcagagttggtgaggtcctgagcaaaagtcgcaggtcagacaaaatgaattctgccaaatctctctgccttcagccttttggataaatctcatgcatatattctgccttgtcatagtaactcttacttggagaatcttttggaatgactataaccttatttcaatattggttattactcatggttgtttcactttttaagaattgactctagacttgcaaagtgctacatccactatcactgcaatttaggagctgagctctgactgaacaaacccccctggcaacattgtggcagagccagttagacctgactgattcctccatgaccttggacaggccactttcctctaaataatctgcttagggaggtccatgcccatgtctgcagtgccacactgggcagacaggcaaggacagggcagtgtagggggaagggtttctgccccttatctgtcaagacagctctgataatttaggctgagaatttcagcctcaaagcttttgctctgccattaaaagaagtaaaaattatttcttttgcttacttgtcccacttgaatgctgcgtaatatcattatagatttatgtgtttatgacttcgtgacctggggagaagctggaaattccactgagcccatttctactcctgggtttctgtaaaggtcacagcaaaattattttatcaagtacaccacagaaagggaaaatcttaatcttaaattatacatatgcagcacttgaccttctcttgagatgcagcacctcttagctacacttacttaaacagaatgcagctcttccctgatgcacacagagagaataattagatgcccttgcatcccagttggagaggaggctgtgcagtgggaccaactacaaagctgagaaggagaaagagttgaggcagttgggatgggggtgggggtgagctccacagagctgcagcaggctcatgcttatgatggggccatctgggcaggtggagcagacattggcaccatgacttgttctggttcacctgcacctctggccaagtcattgccttctctgggcctcatttttgccatcataggtctgtgatgtggcaattcaatcacaggtagtttgtgcctggaacattgtgttaaagtctcagcactctgctgtgggttgagtgggaatgagtgccgggattgattagcaatgtctgccacggcaggcatggagaggtagtgacagtatctgtgctgggtattggtggccccattctaaaaggtatttctaaggtcttttccagccctgtctgtctgtaatttgtgggctcaccaaactctggggtgaggaagcctggaaaggaaggaacaatagcaagcttccctaagagaagagttgtatttgcctcgtcagagtttggagagtaatgagatttgtgtgatacatctaaacacagttgcttgtgtgtgtgtgtttcctatttgctctgtgaaaagtagagagagcaagtgaaagcagtgcctgtcctcggtgtgaccactcagcagacctggctgacctatgtgtgccctcgtagccagcctgtgcgtctggggctctggaaaaagtgagaaactctgggtggcttcttgtcattgtccagcctttagatagaaacacagtgagaagtcatcttcatttatcttaagaacttggttataaattttttttaaacggaatccattaaggtctgtgtcagggaggaaagtgcttaaaaaataaggtttttctcaaaagaaaaacacttcggtttgaaaacgtgggaagcagcctgactgccagcatatgtcctgctcatcccctgcctggagctaccagattgatggtgtttttagaacactggcagccgggcactgagaagggtggagactgggccttgggaggggacagttggggattcccctgtccttgttgatgctgcagagacctaggcctagcacccaagaaggataaatgacctggggctctcagagtgaccaaagtgatgggaccctcccttctgttgggtgccaggggccccgtgaagcatctccctgttggttgagaatgaagtgcaaaggggatacctccctttaaggagtccatcttggctgctggtagggtgcttctgctctcttctaaagcacaggttcctccccgctgccctctagcatgggcttaccacttcctttacctccctgctctgccctctgagaactgatactgtttccctgtctcctgcttagctgtgacatcacatcttctcaaggagggcacagccctgactctggagtccaacaactttccctccctccctccctcccttccttccttccttctttccttctggcagagtctctctgtcaccctggctggagtgcagtggcacaatctcggctcactgcaacctccacttcccaggttcaagcgattctcctgcctcagcctcctgagtagctgggactacaggcatgcgccactactcctgactaattttttgtatttttagtagaaatgaagttttgacatgttgaccaggctgatctcgaactcctgggctcaagtgatcttcccgccttagcctcccaaagtcctgggattacaggcgggagccaccaaacctggcctggagtccaacatcttaagaattccacccccatttagctgcttgctgcctctgcattgggggctcctccagacccccttacacttctgattcctgcgtatctggaattcctcactccgtgtcaatggacttcttcttacccaatataaaggcagtgactagctgatatctatctcagagcacacagaaagtgctccccagatgtgtgttgagagaatgagagaatgtctataaaaggaaaagagctcatccttcaaaagagatttttagggtacactaacatgagtgaggaggtggagttggggacacagagacatgatggttcacagaaaggctggacttgactggggtccttctgtgccaactcccaggccactccccgcactccactgccctctctgccttgtcctgctgccagtggggcctcacttctcgccttcttgccacaccactcacactactcctacctactatttgaaaaaatcttccactatttgaaaaatcttttttagccagacacggtggcccacacctgtaatcccggcatttttggaggccaatatgggcagatcacttgaggtcaggagttcaagaccagcgtggccgacatgatgaaaccctgtctctactaaaaaatacaaaaataattagccaggcctggtggcacgtgcctgtagtcccaggtattcgggaagctatggtgggagaatcacttgaaccctcaaggcagaggttgcagcaagctgagattacaccactgcactccaacctgggtaacagagtgagaccctgactcaaaaaaaaaaaaaaaatcgttttccattcaaaaaagtataagttcactgcataaaaattggaaaatatagatcataaaagatttttaaaatgtgcataatctcatcactataagaaagtgaaatctttaagaacaatatttgttcccactatttgccaatatttttagatgtcactaaccacaggttttcaccatctttcttgatggggtcatgattttccatttatggatgcactataatttattgatctgaccccttattttagggcttttaagctgtaattaattttttcttgctataaacaatattgccatgagtgccctcatagttaaatctttgagctatgtgtgattatttcatttgtataaattccatcaaaagaggagcttgagcaccattaggccatttgcctctctgggtcctacttctccatcaagccctgggaaagagggcaggccagcacacagcgacatcagccttgctggtgtctggctgctgtgaacctgctctgtcccactcccctccatgctgatcatttcaaggttgtaagagccttggagagtgaaggaccaggccctgccccttcccagtctctgcccactggtcccttacttccctgttagctgcattattgcctccttccccagagtccccccatgtccagtgtgtaggctccagaatgtcgggtgtctgtgggggcagatcgacatgtttatgctgtttctcctggggctgggccgtggacaggaggggcctgtcggctgcctcctccacaactcctcccatgtccttcccttgccattctattctgaggcaggcagggccaaggaataagttcagctgagcccctgcttcctgggtgacctaagaaaggcaagcaccttctccagcctcagtttccccctgtgtaaggaagtacagttgttcccagctaaaccttctccctcctgctttccctcttctctgctctctctgtcttcctcagtgctgcagcatcgtacctttcctgacccctctgttggcttaaagctaaggaaccagcccatggggctctcagcagctactggctgtccagttggcctgctatagaggagatgcaggtaatgctgcagcttcaggggcaggaatctctggtcagaggtctgttccctgtaccattccaaagtccagaaggctcttctggccactctgcagattcctgagtctgaagattggtttctctcccacatagacacaaatgttgttcctctagctttgtctgcaggccagcggtcaagggacagacttggggtgcagatgcagctgctgcaggaagagccaaatcagtcctagtctctgagtgagactctcaccttctctgctctggacacttcatactgccactcccaatattccccccaaagttatagggacagggagcccactgccaaagtattggatttctaaaagaggactccagaaagaggaaaatgtctagccctagaggatgaagtgtagagggcaggctttctggggtcagcaggacagcagggacacaagcggacaacaggttgcagtctttgactccttgcacccaaccccgtgcctggcatctagtaggggctcagtgcttatctgttgaatgaatgagcaatccccaatcaattgccagacacttctcttctagatagctcttgaatctatctacttctctctgttcccactaccctaatccattatcaccttttgtgggctgctgaatcttcctgtaaatgtccccactcctccagtccattcatttcccagcaaccagtgtgatcctttagaaacaaaatctgattctgtttcttcccaatttcaagcctatcaagtggcttccgtggacttcagggtaaagccatgggccgagtgggtgacatgagctcaggctgcccctccaagcgctcagcctcctcacttgcctatggatcccacccaccccacacaggaactgtgcctgagcctgagcactcagggcccctgaaggcactgtgctcaggtccttgactgagtcattttcattctccagggccttttcacaggctgctctctccacctggaagcttctctaccttctctcactaacttaccttacctctgcctgttatagggggcttatatcttctttatgccttcacttagatgtcgctttcccaaggctctcccagagtgggttaggtccctactgtggcccttctatgccacctcaatcccatccattggaatttccagctcaaagtctgtcttcctccaccaggatgtcaattccacgtggggaacatctttgtgtttttcctccattgatatatcacaatgcctagcacacctccaagtatattataggtggtcaataaatactttcaagtgaattgttgatgaaaacattcagcctggctccttgtggaaaacatcttgaggatatttattgaggagatactatattccaggaattttacatgtattacactgatcttcacaatagctatgggaaggaagtcaccttagcacccctttttacaaatggggggctgagggtcaaagtttaaataacttgcttaagatcacacagctagaacgtggaagtttttcagactccatgtttgcattcttccagatggcctagagcagtggtcctcagactagagctataccagaatcgcctggttggcttgataaaattcagattactgagtcacatctccagattttctggttcagtaggcctggaggaggatctgagattctgtgtttctatacgttcccaggtggcactgatgctatttgtcttagttcaagttgctgtaacaaacactgggtggcttaaacaacaaacatttatttctcacagttctgaatactaggaagtccaagatcaatgtgccagaagatccagggtctggtgagggcccacttcctggtttgcagatgaccatctgctcattgtacacttacagggcagaaagaaagctctctcgtatttcttcttattaggccattaatcccatttatgagggctccaccctcgtgacttaattactccacagagtcctcacctccaagtagtatcatattcggggccaggcacaatggctcatgcctgtagtgccagcactttgggaggccaaggggggcggatcacgaggtcgggagatcgagaccatcctggctaacacggtgaaaccccgtctctacttaaaaaacaaaagttagccaggtgtggtgacacatgcctgtagtcccagctactttggaggctgaggcaggagtatcgcttgaaccctggaggtggaggttgcagtgagctgagatcatgccactgcactccagcctgggccacagagcaagactctgtctacaaaaaaaaaaaaaaaaaaagaaaaaaaattacattcggaattaggcttcaacgtatgatttttttttctttgtttttttttttttttttttgaggggcaacttttagtccatagcactgctgacttggagaccaatttgagaacctggcctagatcactacaaaacacctgggcttgctttatggctatcctcactccctaatcactgaccttggaccaggattttaggatccaggcctggactctcttctgagagaaaccgatgcctagcacagcctcctacaaccagacaggaccctggctctgaaggtcttggctacgctctgggaacaggctgccatcaggacctcagtgtctgtccctctcccttgagacactgctcttctgtttgtcacccttcagtcctgaccagtgatctccccattttatcaaggaaaagcacccccaccctggcccacctctttaacaacttccatgcggatgcattctaggcttgctactgctactgctgtctgaacaacttaatagcacagtaagttacagtctcttctgtgtcatggtgcctgcagcattcatcaacttcagcaagtgtcatcatgagtgatacaagtgtatgacacagctaagtgtctcctctgcacaggccattacagctggcagcaggcccagggaggcaagaactggagactcatttggctccaagtgcccaggatgatgtagaagtaaatgcgctccagccctcctcccaccatggcccacatagatgcttcgtattcttggcaccttctacaactactctcaaagtttccccaggtaagctagggatggtcttggtgcaatcttttccctttgcctcatcctcccatcctccctctgtgccaacttttacacatcctttgaggccctgtgcacgaaccacctcctctaggcagccttccaacggcaacccactctccccttcctctaaagacctctgtcacagagcatctccacctctgctgtagaaattttattggtaaacacttcaccctgacctgctatgctcagctcagctccttggaattggaggttgtcattcatatttttgtgtcctctgcaagatttttaaatgtactggatgagaatttctttgattactaaagtcatgtatatgtaatacaaaacattgataaagtacagaaacataataataatgtcaccattcccagattttattttccattttgctgagtatgatatgtttgagtgtgtgtgtgtgtgtgtgtataaaatgaagttcatagtctcatactctatagttttagaccacacttttataatatttttccaagtcacaattttaactgctgtgcaatattccattatatgaatgttgcatgatttatttagtcaataccttatcatcagacttttaagttcctccctctccctttctctcttctttctttcttccctattataaataacactgtgatgaacatcaatgaacataaatcttttcccacacctgcttgctttttttttctagaataagtttttagaaataagatcgttgaatcaaagctttcaatattttgaagctcttaatacacatcaaataactctcccaggaaatgataagaatccacactttgaccgagcatgttggcttactccagtaatcccaacactttgggaagccgaggcggatggatcatttgtggtcaggtgctcagaacaagcctggccaacacggtaaaaccccgtctgtactaaaaatacaaaaattagttaggtggtagtggcgctttcctgtaatccctgctactcgggaggctgaggcaggagaattgcttgaccctgggaggcggaggttgcggtgagcagagatcacgccactgcactccagtctgggcaacagagtgagaccctgcctcaaaaaaaaaaaaaaaaaaaaaaaaaagggaatccacactttgtgtgggagtgctcattatctcacattctctaatattaatatcatatttgttgttgttattattattatcatcacagcttttatcttttgtgtcttatcacagcagtccttcagtgaacactcactcaattagccgtagaatgtgtatgcctatgtgtaagtttgtgctaagcgctggggaaagggaaatacaaagatggcaacacctattatccatcttcagagagctttcaaactagtacattggatggatggatggatggatggacggatggatggacggatggatggatggatggatggatggaagaatggacagatggatgggtgcttgggaaatatttccttgccatcagttttctcaacacattgccatgaatataaggggaaatgggagctcccataaggctttgagtcccagtggaatgtcctggggctgttcaggaaaacccattctgggaaagcaaagactgcttttgagaatagacagaggaatcccagtgcagaaacctcatgccacttccttctagggagtttcaccaggcctgaaatttcagagctgggaacctatttgttcagccaccagtaatgtgaaagtaatggagacatttggccacagaagtgactttaaatagtggcccaatgtggggccacaggacctatggaaggagctatgcagagctgtttgcatgacccacaggaatttcttgcccaccaacaccacacctatcacacaattcttagcagcttctgagagaggcttttctgcctctcttacagaatgagaacaaagcgtaagataaaggaaggggaggttgtaggagcaatgaactctgggctgcgaacctccttcttcctggccagaagcatgtaccttgcctctctcccagttgccccatgaggcaggctgacttccctgagccagctgctgagctgcacctgccttgagaaaaaggcacccagttcttaagcaggggatgaatattcattggcatgaacctttgcaaactcatttggggaaaaaaatagatcagaagaagtaatcagattattaaaaagaaagagcaaggacagaaggtggcagtggagggaagaatcacatttaaaatgcaaggagagacttcctccctgcggtgtagctctgaccccctagaccatgcgctgagaatagttaagctctcccacatttatgctgcataaaaatgttgtttttgaggcctcatctgagagggggaagggcagaggtaacacgcaccctccacatctgaaaattataaaataatattttgaggtctccattttatcttcctttgatatcaagaaaaattgtgagagctaaagaggctctggtgagtgctgagtgacaggttaaagggctccaataaagattagatggtccactatctcctgaggaaattgcataaaagtggttattccctcttgcttctattaatttcctcttcctggctgcttggaaatgctttgtaacctgatgctgcagatggggatgagaagcgctttccattatctcaatcactgcactgtttatgagacacttaatctgtttctttataaagtaatagtactgtgggtgatggactcagtgtcactggaagtctgtgtgcagggacaggaggagaggagtgtctcgagagtatggtaagcagaaggtcatttgtcatatcactgaggtgctgagaagttgggtgggtgtttcaaggtgaccttctggataccagccagaggtgacatgcacctatcccttggcacttgaacagggaggcaaatgtgtgttttgtctgttgaatggaaaatatatacacgtttaggcatggggtgctcagatcttgtctcctccccttttctgaagttgggggtggggaaagagatgtgtggtgaggtcggggagaggggtgccatcaaaaagcctcggctatgcaagtttctaggccttctgtctgaactgcaatcacttacaatggaggaaagggaacccctttctcttaaggaaacaaggcaattgtaggctgcactggtgttagaaatgtccagccctccaagttaccttgtcccattgacaaaggtcttaatgcgaatacacagcaaggtgtcggcggctcttctctttctacccacctcctggaaatgtaatggaactctcccctgcaaagtccaaagctgggcactttatgacctaatttccgttcctacttctcctgttcttccacctcttttcttctccctttgtcttttcctcttcttctgaatttcatctcctaaccatcacaataaactgtttaatcaccattgccaagaaatgacactttttttttttaatgcgacacagtctcactctgtcacccaggctggagtgcagtggcgcgatcttggctcactgcaacctctgcgtcctgggttcaagcgattctcctgcctcagcatcctgagtagctgggattacaggcacatgccatgacgcccagctaatttttttttttttgtatttttagtagagacagggtttcaccatgttggccaggctggtctcaaacttctgatctcaggtgatccacccgcctcggcctcccaaagtgttgggattacaagtgtaagccaccacgcctggcctgaagtgacacttttaaccattgtttaaagcatgaattctatgagaaagtatagcataagtgtggttacaaattacaagctaaaaggttaataaatgaactcaggaatactacttcttttataaagtttcttgtgactctcatcttataaggagactctgcaaaaggtgtacatccatccacctggtcccctgtgtgcacacaagcatagcacagatcctgctgtatcagaagcagcattccattgtccacctccctcaccaggaagggagcttcctaatgttggctaccccatctgcaccctgctctattcccctagcctggtgcctggctagaagtcaatccacaataaatatttgttgaatgaggggctcccaactgcagcagtagtgctgaccgtaattctgtaaaggaactcctgagttttgaaatgatacgaaagcagagaactctgttatttaccttaagttgcctgaaagtgctgaaatgtgtttggttaggctaccgctgtatttaattattattgtttaaaattgtacagtctttatgcaggtgagcagtctccaggctgccagggtctccaccactctgcactgtgtgactcccggctgctttatattctcaagtgactgacctggctccaaaggccatttgcttttgcttctcatggcctgaatattcttcatcagaagccacccagaagctttatttatcaacccaagttaaagctgctttttctcaagtgacagcgtagttttcttatttatttttctatgttaaatttctagtgaaaaaatattgttaacttttgtttctgattaatggcacctgatacaagataagttaaaagggctttgtggattagcctggcactttcacccttgttttaagcatgaattctatgagaaagtatagcacaacaatgtaaaagtttaataaattactgagcatatacccaaaagattataaatcattctactataaagacacatgcacacgtatgtttattgtagcactatttacaatagcaaagacttggaaccaacccaaatgcccatcaatgatagactggataaagaaaagtggcacatatacaccatggaataccttgcagccataaaaagaatgagttcatgccctttgcagggacatggatgaagctggaaaccatcattctcagcaaactaacacagaaacagaaaaccaaacaacatatgttctcactcataagtaggagttgaacaatgagaacacatggacacagggaagggaacgtcacaccctggggcctgttggggggtgggggcaaggggaaggatagcattaggacaaatacctaatgcatgcagggcttaaaacctagatgatgggttgataggtgcagcaaaccacaatggcacatgtatccctatgtaacaaacctgcacgttctgcacatgtatcccacaacttaaagtaaaaaaaagaaaaaagaaaaaaaaatctttaataaatgaatttaggaatgctgcttcttatataaattaaggcatgcctagacagattttatgaaagtattaagttataaagtctgagtattaaggagattcatacattttgtaattatatgtaaaatatattttgtagatatgattcacccattatacataacagaaataatatatgtagaaacacattcttccattgggttccaggatttatttgcccactttgggacttgaaatttatattctgaccctgaattctaaaagtccctgcaaagaaaccttgcttttgttttttaaaggagtgggtaagttgggatggagaggagttagcattatttagcacacattgatgctagcgacatttcatatttgagtttattaatttctaataatctgtgggagttattgtgagaaatttacagttctttttcatacaccttttatgcagatgagcaaattgaggctctgagggatgatataacttgccagtgttcaccaagctaggagctggcagagccaagaattgaactcaggactgtctgaccatttccaaatgcttgtttctccggggagaatggaatcagaccccctcctggaacctctctcttcaaccactccccaagcttctctccctgatgtccagcttggacctcctcccctccacttcctcctctcatggacaccttggaattcagagactcagtcacccagagctactgtcctccatcagaaacctcagaggaggcactttccacatccccctgccacttgtggatatcaggacaattgtttatgctgttaacttattaaatgtaaagtgaggaggcttttacgtgctggaaagaaagggaaaacaccttgttcttgttggactggtacattaagaaaattacagcatggcaggggccaaatatgaatgcttgagtcatcacctctacccctcccccactctccagagacagagctcctgccgagtccaggcagcacaggcctgggatttgtctgtattcactggctgcagaactgaatggggccaggaaggctggggatttattaggaaaagagccaagtgtttctcacaggagatgaggagagatatggaaagaagaaaaggaaagagggagaaatacagagagagggaccgtaatgagtgggctgggaaagatggattagtaagccagagtctcctcggatacttttgccattcagagcttctccctttcatgtttgatgtgttagatctttaataaagactcaaacagtactttttttctttctacagagaagtttcttctgaatgtgctgagatgagtcaggaagtggtccctttttacatggttcgcaactgacattgtttccccaaacctgggaaacaacattcactccagtgtcttccccgatcccaggggatgctctgcaaagtaaggcttcttggtgaaaaaacatagcattttaaaaagttttaaaagttctcaacaaagaataagatgaacttttaaaatcagcatttcaaaatatctggccacagtacccttttgtcataggtgttaacaatccaaagaacgtggatcccatgggacacatttgggttgtgccattccagaacattgtgttttggagattccttcctgtccaaaatggcaccccacccagcacatgtctggagaaactgaaaccttttcctcaccttaagtgatcaatggagtgagataactttcacagcataggaaacaattctttcttcttgtcttagcagaaaagcagtggatatttttcaaatagtttatgcgtacatcatcactatcatttctcccactgtgtgatccttggtaacttttgtaacctctccgtgtcccagtttcctcattagcaaaatggagatagtaatagctaccccatagagtaatgcatggaaagcacttaacaagacaagttaacagatggtggctactgctattattaaagaatatgctgcactttccaggagggaacaatacatttgagattagctttctataagtagaaaccattataatggcacttcaattatatgatgatcacattgtattagatttatatgacttcattggatcaagagctccttgaaggcaggctctattcttgaattccctatgtcatgttttcagcaggaacagtaaatgtttgttgaatgaagtaatgaggtgtgtaagaaagccaaacaagttgaccagtcagtaggttttacccagtctcaaaggaggatgagccagagtaggtttcatggggacaggaagagtgggggctgagataataaggaagggccttggggaagtagggtaggcagaatcaatcttgtgagggatcaacaaggaagagaccagatgtctgggctcaaaagtctttacagatgagacaaagttaagacccgagggatagcttggagccagacttttcagagaatgactcattataggctgatcccacaggaaattaagaggatgtgctgcacatatgagggcccctccagtggagatcaggtagtatcaggtgttcccaaccttccccactgccatgtgcatgatagatgacaccaagtgtgtgacacgttccctggtgtgctgtctgcaaagtcatcctttccttgccccacccccggaagcatatcaaaatgcaattaaaggagaatgatgttgttaaggcattaaccttgaaatcaccctaatttagttttaaagaatcacttatgaatttcagccctttgccatcattcatagcaagagcttgttaatacatctcatagtgtgttcctcatgtgtgctgcaacatggcattgaaaaaccgtgggtccaacatgtcattgaaaaacctgggacccctttctaactgaggccataggatgagatgtctttagtgagtggctcagggaaaggccatggatgttaaccaggtagacagaagagggagtaaccatttatagagcacttatgtcccaggaactgagctacactttagatttgttttctcaattaaatctcttgacacacctggaagggaagaattattatccattttgttcaagtgagagaggtcattggtaccaagaagatatatttcacaaaggatttttgaagaattggaagtgttaaatatgggtttcctcaaccttagatctcccttggtacgagaggggcatctcaatgttctttttagagaggaagacactccttttccggttgtagggaagagtttctggctgccacacttccattaattatcacatggtctctttgtgttctagcttgccctgcagggacattcaaggccagccaggaagctgaaggctgctcccactgcccctccaacagccgctcccctgcagaggcgtctcccatctgcacctgtcggaccggttattaccgagcggactttgaccctccagaagtggcatgcactagtaagtgtctagtaatggctctgggctggggagtttggttccctgatggtgcaagtggtgggtctggggcaaggaagagaagacatcatcctttgatcccagggcaaagcagaattgctggccatggtgctgaaacatacaactcctatgctcggagttcagaggccttgtccctacgtagcactgggtgaagattacattttttctttcttcccccttcttcccatataagaggaccttctcccaccccagcaagataacttctgttcatcagatgtcagactggagagttctttggatgcaaaatcatgatctattatcacttcctccaagaagtccctcctggtgcctatagctgagaatctcctatctctttgctgggtttcctgtatatttgtaaccagactcccctcagagtgctcatcattttattaattgttcagtcattctgtacttatctcagttaccaaatgaagactattgtgtgccaggaccatatattcatcttcttgtgtcccttcaaatgcccagcctgatgtagcatttgtgctcctgtcaaatgacaagaccagtggcctgaccacagaatgcatctccaaggcagaaattctagggaccggagctaatgcattggctacatcactctcccattatataatatagagggaagagcagtctccctgccaaaaacggggaaaggcagctacactctctggatagggatgtgagaaggggtgcatttctcccaatattctccccaataattgtggaaggaggcaatcactactgtccctgcacagtactttggataatttgctcctactcctctgagcattgtagccctgaaatgtggatgacctctcttttaagtatcccattgtatttgggagtcagtgctccaggttagcctctaatgtgttagaattttcttcttcattggataatgcttcctggctccctgtgagcagggacctttctttacacctgcttggaccaaatcccttccatccatccccatcacagaagaatatttcatttatactttctgtttgatgaacagaaaaagtgactggactcttagtagaagaattacttaattccagccttgtagtgtatgtaacctttactgagtaaagagggggaatgaaagtaccttctagatcaagttcctgagttcaatcaatgtgtatagatttgaactgaggaaaagctcatcctgttgtaaactgattttctacagacctctctctctgtgggttaatattaacaaaaatgattgtttctgctgaccagaagtcctgtttttctgttgtgctatctcctccactgatttctgaggttgccctgggggtcttcaataagcccaaaaagcattgtttaatgtacttctttagaaatcacttaaggatgctgaatcactgctccctggatgttcagaccaaagactagtctccatgattgccgaagtatacgcccagggactcacagtattcctcctgaaaacgctcctttccattccttctcattaacccctcaggtgcacctggaagtctggaggggcctcaggtttagtgtgcagccgttgactttaaatggattatatcagtagtcacattcattcactggcagtattggaaagtttataaagagttttagaaatttaaaatgtgtcatttgacaaggctataaaacatatagtgcactaagaattaatatttttaatgaatcctgttaatctcttggggctggcacacatgtagtcattgtatttttgtagtgctacaagtgttaatttatttcatgtaaacatttgcaatgcatgttaccttttgcagccctgtttaggcatttgtttcttttatttttaatctactgggagacccagggacccctccacccttgacctctgagatgcctctgtgtgtccagccttgtccttgaattttgtcagtggactgcacagggatgcaggtgcacctcaaggtgtcaaaggggctggtgtggtctccaaatgaagtcagaggagggtggcttagagagctctgtgttttgagtctgcagtcacatcactgctgctggtctctggacgactagctcccttcttccttcttttctctccccccttcacttctacccaggcctgcagctctagatcttcccagtacttgctcatatccaagaagatgcctcttccctcaaacctaggccaggtatggaatgaggtgggagcttaggggatagctagaggcaggtgacaagtgactcctcaccactccctgctcacgaaactccctgaataaagacagactaccaggacagtgggaatcaccttcagtgaggagttactgaagggctactgacagtaaggggagggggtcatatgaaaagacaatgggagggaacaaggggaaggtgcagccccaccagcagggaggggttgcgaaggttatggactgaggaaccagctctgagctttgggcttgctgtgcttctgctgaaaaagccgctgccttcctccctgtagtgctccctgaggcactgcccagaagccctcagtttacctggtgaatcctggcatccccaaactgcctcagtcttgagtgggttctgggaaagctcatagaatcattgatttcatttagtgggtggaagatgggctttggcacttcagagacaaaagtttcaaacttgattctgtctcttgccttctctgtgaccttggtctaaatccttggtctaagctttcttacattctgtcattttattctcacgacttcataataatgtatgcttttctgagttattatgaggattcagccaaatagtattgtagagtccttggcacagtgcctggttcatagtaaactctcaatcgatgttagaacttgctttggttacatccctggaaagtgtgaagattgcagcagatattgaagcttccagcatgagaggatgttggatatctgaaaataaaagtgatgttgttgggggagcccaggcttgacgccatcaccgagcatcacagcagaatccatgatatggtcccaaaccacacagtcgccttggcctaaagaacctgctgaaaacaaatgagaaggtgactgccctaccctgcgacctggtgtgcagtgggagaaggaaggaggcacaggcagagcttctgagaagctgccgagctcgctgtccctggatgagaggtgccaagaagctgggcaggagcaatggctcacaatactggctttcaattcccaggcagcagcggcctagcagctcctcacactgagacacacttccttccacaggagggccagatggcaagggagacatggtggggtcagccgggcagagggacagccaggaacacactcggaggtgaacagcaatgtgaaaccccgcaccatgttgcagggcttggcttctgttttaaataatttctagtttactgggggacgaaatggaaaggaggaatttatgaagcaggtgaaaacagataattatgccttataaaattgctgcctgtgaaaaactatacagaaggactggtgtgaaaataattaccttgttacattgctgaccacaaaaaccccttttctgtcactcacatggaagaaattttgatggatcacagaggcaagctagtgcttgccttgtttcttttatttcttcttcaaatgcaatgggcttccctctgcagttttgatcatagaaatggaatgaaaaaggggtcattgtgtcccttgagcccaccagccgaccccttagatgagggacacagtgcctgccagtctttcggggtttccctggaggccatccctgtcctccctcctgactgccactgagaggcagggaagcttagtggcaggggcaggggttttgagtttggctcctgacggtaagacctggggcaagttacttagccttttggaacacgagcttccttctggataaaattgggtatgctggaactcaaattacgaggttgtgagaattaaaagccagcaagcaaatgaagctccaggatgaaaactcaggtctgtctgactctaattccatgacctcagtgatgttgcaaaccatcgtggcgatgatggtgattggctgttattctcactcatgaatctaccttgcttagagaaggataagaatctgctcttccttctcccattcctgcatagtctggtttctctcctttaagttcatgtttcatcttttaaggtgctggcagttgtttccctcttttatcccaggcacgacagggcagtggtggggtgggggggtggtgtccctgtggcataaggatcatgtcccttggacagactgcccaggagtgggacattcccagggcctagaccctgatcttcccagggaagcagggtggatggagaagagtgcatagggtttagagggtagaaatggctttggtatgacagaaacagaatgacgtcctctgcaggtggcctctgcagccaggtttggtggccatagagcattgtgggtctgtaaggacatgagcttataagccctctggtcttgggcacaggatctgctgcatcatgctcaataagatccccactgatggtttcctttaggtcagtggttttaaaatgcagtccctggacaagcagcctccgtgtcacctaggaacttactaaaattaaaaattctcagccccaacccggagccactgaatgagaagctctggaggtggagcccagtgatcagagttttaacaagccctgcaagtaactctgaaggctgtgaaagtttggaaacattgctttagagttgggtcatattcctctgtcctttgctttatgacttctgaggagaaaggccattgggtgaattctcacagactggaaccacagggccttcccctccccatcaatgtcctgtgtgccaggctagaaagctgcagggaggggggctgtgaatatgtatgtgagagagaggaggggtggggtctgatgtgagtgtgaatgtacgagcgcatctgtgtttatttgagtggttcaagggagggtctcactacttctcagaataatccccacctgttctggctcaatttctatttcattttcactctttttttttgagatggagtctcactctgtcacccaggctggactgcagtggcgtgatctcagctcgctgcaacctccacctcccaggttcaagcgattctcctgcctcagcctcccgagtagctgggattacaggtgctcgccaccagacccggctaatttttgtatttttagtagagatggggtttcaccatgttggtcaggctggtctcgaactcctgaccttgtgatctgcccgcctcagcctcccaaagtgctgggattataggcgtgagccaccgcgcccagcccattttcactcttgagtggtcagagcagtgtgaagacctgcaaaggacatcgttagctggggctgggagcagtgaccagggagagaagcgaatggaaaccaggaagcacaacgtggctggagtgagctcagcgggggctgaaggagaaactgaaacagaaggaaagtgactgatgggcaccatttgcctgaattcagatagaggatccagagggtagccagtgtaaatgggtgatgggccccagctcacctaggaggaaatcagaccaagaggaaaactctgaggctgctgctgcagggaggagctcttcaggccaatagggcaataagcattccacatgagacaggaatctagtgttgtaaattggggactgcttgcttgtctgcatgtctacacaatgagggtgatttttttttaattttattattattatactttaagttttagggtacatgtgcacaacgtgcaggtttgttacatatacatgtgccatgttggtctgctgcacccattaacttgtcatttagcattaggtatatctcctaatgctatccctcccccctccccccaccccacaacagtccccagtgtgtgatattccccttcctgtgtccatgtgttctcactgttcaattccgacctctgagtgaggacatgcggtgtttggttttttgtccttgtgatagtttgctgagaatgatggtttccagtttcatccatgtccctacaaaggacatgaactcatcattttttatggctgcatagtattccatggtgtatatgtgccacattttcttaatccagtctatcattgatggacatttgggttggttccaagtctttgctattgtgaattttaaacagttttcaaaagtcgaccttttgacaagtgtttacttgggttaatctagggcttgcaaaatggtaaaagaaggctgctttgctccagctgagctttacccatcgctgaccagggctttagtgtaagtcaccctgtgtgttctatttgataggtaaagagactgatattaccccgatatgtaatccatgttgcccgttaaaaaatacatttgtgtttttgaaggggaggtagtctgtgttctccttgaggtgaacttcagacaaaggtcaaagatcaataagagtcagagggcaggcctagatttgggtccccgccccatgctggcccccgccccatgctggtagatggtctatacatctggatgcaaaagaaaggagtgtgactgcaagctggaagctatctataactgtcactgccacatcaggaagggtcagcgttgcctgtgtaaatgtgctttcacacttctgtaatctacaatttcttttcatagttgtttgacccaagtgagtataacctttttgaggaattgtatagctctaagttttaagctaaaagccaggcacacaagctaacatgtttgtttcagaatttcacaagagcatttggagtcacagattgttgacactctgagcactgccaccccaaatcctcccaatgttagccttctccctccagtaaccccgagaggcagaggcggtcatgccacttttattgttctgagcatttgtcatgacagctcgtgtcttgtgcagggcagcgtcactccattgccaacagcagtaacccatcgctgggggagaggccttctggacttcagattaggcactccttcctcactcctggccattggtcggtccttaaggaccaatgctcagcaggccagtgattttaatgcttaaggacaatgttcccatctttttaaaattatctccttgaggctaaacacttgttgctttaactgttccccaaatctcctgacccatgcccctgcccctctgccatttgtccaggctcctggctggccttttctgaatctctcacatttatcgataaggctcttaaaatatagcagccagaatgagacttgtgatcctcactccagagcaaggttcagtagaaaagtcatggattttccttgtgattgggatattgcaaccttgtgttcactttggttgcagtcactgaaactgtgagctcccaccacatgtggcagccactaaacagccagtgcttttgtttgtcccctcaggaaatgctgtctgtttgggtctcccctatgtgcacttatcagtacgatttcagacattttaccttgtggatttaggcacagtgcactttcacgtacagatcattttaaatactgatttttatcatctttcaaataagcagtgttagtataattgctaagagtgtgggctctggagcctgtgcccaggttcaagtcctgctctactactgaacagtgatgtggggcaagtgacaaagcttttctgtcttcatttcctattccataaaatggggataatattggaatctgcctcactgcactgttgtgggaattaaatgcaatatactatttaggttgggcacagtggctcacacctgtaatcccagcactttgggaggccaaggcaggcaaatcatgaggtcaggagttcgagaccagcctggccaatatggtgaaaccctgtctctactaaaaaaaaaaaaaaaaaaaaaaaaaaaaatacaaaaattagccgggcgtggtggcatgttcctgtagtcccagctactcggaggctgaggcagaagaattgcttgaacctgggaggcagaggttgcagtgagccaagatcgtgtcactgcactccagcctggatgatagagcaagactctgtctcagatagataaataaataaataaataaataaataaataaataaataaaacaatatttggcatacaggaataattcaataaaagtaagctatttgattttattactattatcagagttgtctaccctactttgatgtaattttcaaagcagctaaaatccaagcacaggcactattatttagttaacatttcttccttcaatatacaagtatttgtatacttttagaagttactcttgtggaaatctaggtttactctatactctatactctttttcttcacaggctaataaatttttagagaaagaaagaatgttgactggcctgacttacacatagagaacacacacaagttcttgtcggtccttccttgaggctcacaaagcactgatttacttgtgaagttccagaaggaggggattaacgtgaagtgcatccatgtaatctactcccttctctattttaaaactcagaacaaagctgtcctctccatgactttagggtcccctcttgccaggaatgctcctttgtggtctcaggcaattgtcttggtgtcaaatttataggttctggtccaaggcagaactggcctggaatggatgccggaacttaattgttgccacagctcagcttcttcaatattctctgctccaattgttcacctctaaggcgaaggcagtcaggagtgagtggctgtgcgtcctctgtcctctgccagcctctcacctcctcccccaggcaggaggaggccttgctttgcgcaccctgagcattctcagctattcagagctattctggtaccagaatcatgcctgttcactggactggaagctctttgacgtgctgatttgattttttttttcttttaaatctgcttcatgaccttacagagcaggtgtgtccgatgcagtcaagtggtaagagccctactgtggaatcaggtaaaccagggttgactctcagctccactccttcctcacagtgtggccttgggtaggtcgcctaacttatctgaatctctatttttatgtcccccagaatgaggatattgtttattattgtgtccattgtgaattgtatgtaaaatgcctaactcagtgttagacacatgcacagtgctcaataaattgttgtctttgtttgggtttttatgaatcatgtttaagaagtgggttttgagtctctaagatatgcaattaaaaataagaaaacatggccaggcgcagtggctcacgcctgtaatcccaggactttgggaggccgaggcgggtggatcacgaggtcaagagattgagaccatcctggccaacatggtgaaaccccgtctctactaaaaatagaaaaattagccaggcatggtggcacacacctgtagtcccagctactcaggaggctgaggcaggataatcgcttgaacccaggaggcaaaggttacattgagccgagatcgtgccactgcactccaacctgggcaacagagcgagactctgtctcaaaacaaaaacaaaaacaaaaaaacattaaaagtataagtgcaaaggcttttagatcaaattctcctggagagccatcctaggttagctaaattctgaccccatcactcccctgtctctaccccatcacaatgtgattacaaatctgtgtacaacctgtgctaccatcttggtccctagcttctcacaggtggtccccagatggccttttggtcccctttgtcttccctcttccatccatgataatggcaccagatcctgatttcatttggccagagaccaagcccaaatttcacagtgggatctgagctgtgtctcactcctagacctcttgccagtgcctcgtggtggtcacttttcagagtcaccactgccagtcagtcctggaacctgtattgatccactggaccctctgttgatgaccactgacattgtcccaaagccaggttcagaatctaccctgaatcccattgcactggtgggcccctgtctgtacacccacctttcgtcagtatgcttctcaaagtctgtccctacatctgagcttgcagccttctaccctctccaaggaccagtatatttcctgacatgtcttggagactacctatactctccttcattctccaagtctccagctgccatattggaaatctggtaccagccaacctttcccaaaccaggaccatgactttccagattccctggtttggtaatacatgtggatgtcgcatggatgctaaagccagacccacacacatcactgatggcttcacttgggtgtgacaaagaccagggatcccagtgtctttgactctgatcaggtatttagagggaagccactttccacttggcataaaggtagattctgagtgatatccacaaagagcagaggctgcctggctagggatctctccataactggaagtgtacaaaaaggttctggtgatgcctgccaagagggtttctgaataatgtatgaagttaggtaaagtggacaggaatgagtcttatagtcagtatgagcaagtccatgctttctggattatgtgtgccatagtatgtgaaagccagcattttgtagtgatttattttgaaactgtgtgtttgctttttctgagaagctttccccacaattggctggaaaattccaagtctgagccagacacctgagaactgctatgatatgggattggctgtgggcttaaaatctggactttccaatgtataaataatcactgatgattttgaagacacagagcagtctgcagtctgaagtcaacctatagaaggcttatgattccctctaccctgtgccagagactacctccaccccattaaataaaaagtgttctggctctgaagccacatcaagaagggtggcttgtcttcaagaggctgaaggatagagaactagaggctagttgaacactaaggtcaatctgtccccccttcccattctggagactagtaggttgtggcaatggtactaataggaatggtgtgctggcccctccttggctgtgtcttagacttgcaggagatgcccaaggtggccttttaagcaactcctctgagtcacctcagaggtttgcctttccaggcttaccttggaaatggcaatgaagggtgctcagttgtgcaggttggagtgaacttgcatggcagctgtgtagtgagatgaagccaggtgcaggctgtctcttctggggcagaggtgcccagaaggtgagggctggggtggggtggggggcaatggtcagtgggaacccatggtcactgccatgccctgccagtactccatgagcaataatggaaagccactcagttctcacaaagagattgtcatctactggtcagcaaaggggaactgagcaccaggtaagaattggctctccctgtaagtgaaaggcaggctttgcgcccacacccggggacagggtctgcatgaggctccatgaggtcagccgtgcccatacccacacccgtctgcacaggtcaggttgtgaagcaccaagtcttcggagacagagaccatacaccattaccatgctgtgtgccatggtgctccactactcagtgatagctgattggaataagaacacatgtgcatacctctaacactaataactggcatttattaaagtgttgctacagtttaggccctgtgctaagcctctgacatggtttttctcagttaacctcagagattataagacaggtattacaactggttccaatttatagatgaaggatttgaggcccagaagggctaaatgacttgcccgagtttccaccttattgagcagcaaagcccgtatttccttctacgcctgacaaggttcaggtctccagctcttcaccctcagtgctagtctacttccctcgggaaggaggaggactattgcctctgatgtgacctggcacaaaattaatggtagaatcccagctaagatggggaaggatcacattttgttgattagaactagttatgtgctctccatgcaaggcggctgggaaaggtgtcttctgtgagacttgagaagagaacagaattgcacagggaggccctagcaacccctaccgagtatacagttccccatgggtgagtgtttgggcccattcagtgtttcattaatataaacaataatactgccacaaaaatgcatatccctatatttgtggaggaaattcacctagaaatagaattgctgggctacggggtgcatgcacttagaaccaatcaatattacaaagtgtttcccagaggccttggccagtgtacactcttcacagcagtgtgcatcaggcttctccacacactggcctgatgatgctatcaagacttttattttttgccaagttggctgacctcctagtcattttgattagtatttctctgattataaatgagtgtgtattttttatatgtttattgaccaatttagtcttctgggaattgtctgtttataacccttgcctttttctatatttaaaaattgatttctagatgacaattaattatatgtgacaccctgccctccagccctccatttatttttaactctgtggatacttgttttgtcatattgaggttttaaatttttgaactcaaatctgaccatctttttctttctggtttggagattggtgtcttgagcttttgactacattttatatatgtccttcccactctaaggcatgaaaacactctcttatactttctttcattttctttttctttcttttttttgttttcttgagtcagagtctcgctgtgttgcccaggctggggtgcagtggggcaatctaggttcactgcaacctccacctcccgggttcaagcaattctcccacctcagcctcctgagtagctgggctacaggtacgcatcaccatgcctggctaatttttgtatttttagtagaggtggggttttgccatgttggccagaccggtctcaaactcctagactcaagtgatccccctgtcttggcctcccaaagtgctgtagttacaggcgtgagccaccaagactgggcttttatactttcttttaattctctgtatggtgtttatgtttagttccttcttccatctggaactttattttgcataggatgtgatatcagtattcttttttatcttattaaaaataacatcccatgagctccacctgaattgtccacattttggtgagatgtttcttttattatatactaactgtttgtgtatgtttgtctttattctttctaattggtggttctgtctgttctggcaccagttctaaactgttctaaagatggtagctttctgatatgtctcaatgactggtgaactaagtctctgtatattattcattctcaaaaatagctatcccattcttaaacgttgttttcttcaagatgaatcttacaaccagcttgacaaatgtcattaaacaatcctgtttaatcagggttggaattgcattggatatatagattactttggggatgattctcttctttatgatattctttattccatccaggcatgaggtattcaagtcttcttttacgttcttcggtaaagttttgtagtcatcttcacagaggtcttgtgagatttaatcctaggtattttatggttttgtggctattgtgaataaataattttttattatattttcaaacaggttatgattattaacagatgacagtgtagtggtgggaatagtgagctttcttctgctgggcatcttgtgttagtggacatctaacagaggctggccaacagggagggactgtagagggtgtttgtcaccagagatacactgaccaccaaggtttcattgcatgccgtgaattactgtgtctatgaaatgtcaaaatcaggactttctcttgggtgacctataacaccctggaaagtatacttacctttttcaatttcttttttgttctcttgaccttgaattgttgtcttaggaacgagggccttttctggatacctggagagaggcagcacatgtctcttttacagctgcgtaagccagtgcctggaagttatccatgaatatttaacccacagtcacttcccagctgttatcttgatgccagtctgatctgcggtctctagaaaaagatggaaaattatgacaactagaaaaaattgtgtcatctaggaagggggctcttaatcatttttgatggactgtggagatgcaggactcctccccgggcatccccatctctcaggaatggtggagagataggacttctgaccatacagtagcccagaggttccatcctatctgcatgcagcagggactcctccagtctggtccaggtggttgtcttcttgtaaaagaaacaccttagaagtcccatacccttccctcatcagtgcctagtatccaaaagttcagcagagtatgtgttgtgtggaactagccaggttctgcactcctgagagtggcttgcgaggagctgagatcctttacctgcaaggctttcatcgtatgtgacctccatgcctgatggactttggcccagtggctaccaaccagatctccagatgcaaagcaaattcctatccagatctgaatctccacacttgcatctgcatggagagaattactgagctctgggctgtatcaggatatgctaaatcaaacgagtagttttgggtggttcagggcctgagtgcatcaattagaaataatgtccagaacaaggaactctgtagaagttctgtcctgtaagacctattcctctgttgtgccaaagactgaagtgtgtgtcaatgtcttttcacttcaagaagactctaaccggcttgcttggactgttgcctccagtgacagcaaatgccttggagcctgtcctggcaggatgtggcctggtatggtgatctttcagcaggaagtgctctggggattcttcctctgagacactagatcagaggtgctgtgagcagggcttggcacaaggaccctacctaaaggcctgggagaacctatacaggaggtctgcttggggtctcaggggccctaggcaaggagatgtttttcctgcttcacagggccttcaggtcaagtgttctgcacaaagtctttttttttttttaattgtacaggtgtgcacttggtccctgtttcccttctagaaagtgaatagatggaaagggactcccagataactatatcaggcagtcccttatgcatatgaagtacactaaggatcacagaatgctttaacctatgttatgccatttgattctcccataaagagggcagtgttccctccaagttcccgtagcacaatgcctggccatctccaggctcagggggatagatctccactagctttgtcagtcagtggtttgtgtggctgttgtgcaggtgcctgtctcctttgcagaccttcagcttctcagggtagacatcggtgaacttttcataaacccacatacacagcacagcacacaggagggtctcaataaacacagatggattgatctgtcaaggatcaatgaatgattaggctgagagaagataagtgactgcttaaggtcacactttggcaaggctaagactcagccccagttttttctttgagtccagtgcatctttcctcactgtagaaagcttttgatgctgcatttcaggggtatgaaaggggtcttgaaagccatgtctttaagatgacatgacctatagttcttgacttggagcatttccaggggattttcaggggtggcagcatattgtacctttccactctttggccccaccttgagccacagctagaagattcaaccttctatccatctcccgcatggatagtaacctgagactagtcataaatacctccctactgaggtgcactgcctcccaggatccaggggcctcagccatcctctaagggcttctgcagcctcaaggaaacctagactctcagacttgagctcaggctaggtagaggggctgtctcttttcccagaatgtataatctacttcctttcttccagacaattggctccattgaagcaggagaaacaataagtactttctacaaacactggttttggtaaaatgtgtagcactaggctctttgatgctcctgaaatccctctcagcagggtccctccttgttttgactaatcatttcttcttattactaactgttatgattaggagaattgcctgagtacaggcccagtgtttccaagaccctaatgagcaacacgtgcagactcgcttagcatagtcctggaatcatggttgttctgtttcctcagggaagctgctgagatgcctcagggacaggagctttttcctgcctctgtgaaatctttccccagcccccagaaaatgctttgcatcacagctgtgttgtacagcattaggtgcctctaccccaggtggaagagttgttaaggatgagatttggaacctgccagccctgcactcaagtcttggttccaccagtgcatgagttgggcaagtttctttatactctgagctagagttttctcatgattaaactgtagacaatagttcctacttcaaagagtgttggaaagataagattacattaagtaatccacaaaatacctaagacagtactttgcatacagtatttatcaataaaagaaaattcaaatttccatgttgacctccactgctttcagatgcacctagtatccaaaagttcaatttctctttcttggttccaaagacaattcaagggcaagtagaaatctgctccagggaaaggacccaaaattggtcatttgggcagtgatatgaacaagtttcatcaagtcagagccatgtccacaggaaggcaatgggacagggagcccttttggtcacctagaaggcaagcaccatgcccagcaccagtgctgggcatgcatacccatgtagcaaatatgcctccgctagtgactgtgtgaccacagacaagacattctgtcactctgggcctttgttttcttattgttaagttggggataataatgcctcatagaattttgagagaaaatagtgacatagtatctgtaaaaagactgttcgtgctgttcagagatgttacaaagtattcagaatctgcctcttctcatctcctctgctgatgtcattctggcccaagccaccatcacctctcccctagatgactgctgtgtcctcctgattggtctaccttcttccacctttatcctcttctagcctgtcctccacaaggcagcataagtctaagcatgccatttctctgctcagagccctccttacagtaacacctcatttacagtaaaattcctggcaggctgaaaccaggacttatgagtctgcctcccccactacctttctaatctttattatgacccctctacttcttgattgttatatggcaaccatgctgcttccttgatcttcctcaaagaaggaaccaagtacattcccacctcagggcctttgcacatgccggtcctttgggctggggaacactccctctagatatttgcattgcttctgtctcatcacactcaggtctctgtccagatggcctctgctctgagagagctcccctcaccacaccagcatgctgtctcccctcctccttctctgtgtatcatcagagccctatgactgctgatactattcatttatctacgtattgaaatgttttctgactccttcactagagaataagctccatgagggcagtgtctgtgtcactgtcttcacattcatcattaccatataacaatgagttaaaaattacagctgccaatagagaagccatcctaagtgactggcactgttctaaacctttacttacactgctcaattggtagtccattacaacactcctatgggttgctgtgatcatcatgcagattttaccagtgaatatgctgaggcttagataggctatgccaaaatccagaattcaactcagttctgtctgtatctgaagatctgtgacctcccatccttagtaatttgctactggggttcatttaaagctgatttcaaaggtggtataaaattttctctgataaggttgtgctcacatggctgttagaaaaagtagaccaacatgatttccctgagctttaatgccctctcctccttgccccagtgagatatcctacactttgaggacaggagcctcaaaggatgcctgagcttgcggtgagacaggcatcagccaaccttctagccagcacctgctgctttggaccctcagcacaattccctctcttgaagggacacctcagaatttcagacaccacttattccatattgagcaaaaccatgtcccatatgtctggtattcattgtcggcagattgcagacaatgcttggtctgtttttttctgaagatcctgagcccttccaagcttctgctattgagaggtggatgtctttggcatcctttaaattacttaccagtctgtccactttggtgccactagtttccacaggcccctggtaacttattcctcgtttcccatattgcctcagtaacctccctcccctatggtaaaacagggcaactcttgcaccactgacctctgttattgggatcttattatgatgcctgacatagaatctttagaagcacccccactgttggccagagaactcagtgaaagggacagagaacacataggcttatgccactctccaaggtcctgaaccaacatgctgcaaaatatcacagccctttcctctatgatgctggtcattcctgtctgatgtgctcctgttgagggaatgatggaaaaggaattactatcatacttaggaggagcaagagaaggagaggaagagagctgaacttaggctagagagtgtcataaccacaaatggtacttagaaagaataaaggtttggtgttgttttcttttgttttggcattgttttcaaataaccatttatcaagaagaaacaaccactgcacatgaagctgaattcatgtttatttgataatggtctacatccctgacagttgaaactttccctcttttggcttatgttatcctccaatccatcctgcttttagccgtgtgtgccatactttgggctaggtataataaccagcctgacttttttccctgcatatttcgcccccatagaagacctcttcaaacttctacagcccccatttccctgtctgcttctgcttcttgaattctgcttccccataacatctcaaagacccttttaccttctccagggcgccttccaatcactcagacatggttcctttaagtagctgtgtcacaataaccaatggagaaagaaacactctggtagaatccttattttgaaaattgaattctggaccatgctactttcccagtcactcacaccacagtctctcccaccatccatacgcctgatatcattttctggtcaccctctctaccacctcttcacctttattctatattgaagagtgctaaagttgatattgaagtacatattcaatattgaacttcatattgaagtaatttttccaaactacaatcttgaatcttctcagccatggagaacattacatttgttgctttcctgactgataatacctaggagtcttgagtatcaagtgtccttcctggcttattcccagaccccactgcaattctttcacctaaagagagaaagaaaagagggcacagtttgctgtgggagtaaaggaaaggtttcctttcccataggtcaggggaggacaatgaataccagataccaagtcaaagtcaggctacctctagggaggccaggaagcagagatacaggtacagacagaagtcacaagcccagtacctaataagaactggacccattctggagacacagccccatgctcaaggctaaggttctgccccttggtagaagtgcttgctggggctaggtggccaggaaggtgcagattggggcaggcagactccaaggtgtttctgtgacaggtaccagagatcatctctgaatctattgatttgcactggtcatgtcttttcccaagcatctgtaacaccttgcatctgtaccactttgatcctttactgtatgtgttcacagtttccagcactccttaggtatgggctcctacatcaggtttccccaacataggttccatgacctcacggctttcacagtctttagcataattctgaatgagaggtctctgctcaagaaagggtggctgaattaggtcagtcttaattacatgagcaggtgaagattcccgataatccaataatgacaatacaaatactactactaccactagcctctgatgttactcaatttctctgtggaccagctacagttaaactctttaggcatgtcatctcattaaattctctgacctaccatctttcagataaggaaactgagacttagaagttcactttctcaaggtcaaccaactagagaatatgttttaacttggttactgtgaacacttaggaggatcatcggttggtttcgggggactaagaaccccctcagagtctgaaaaatcatgtgttgcaacacgtgttcacttttctgggggaaaagctttgttgcttttatcagattctgtaagtggtcatgcacagagtagggagggccccacctctggcctgatgcagaggagcatgatcccagcctgaatgtggggttttccaggggagtgtttctcccaagttatagctccaaccttgtggacaaccactgtggttgccaccttcaccatcacccaatggggagggatcccaggacacagaccctggcttcagcaatgcacaatgagctagacccgacctgcttggcaccttgtaccagcctgaaatttactactaaattctgagaccagaaggttagccttattaagattcctgataaaggaattggctttgggggcttacctgtcttcagcagattttcactttgattactcaggagtgctcttatttccagcttaatgcctgcaaataaactcacccgctctctcccacacaccctgtctcaccattctttaaaaaatcatctggcccaaatcacattaagaagcaggagattctatcttaatatggtagcacttgggctggccctgtgggtctagaaggatcctgtttaactccagtgacaaccgtgctccatgcaggctaagccaacctctcaggcacatcctggaggacatcggagacccatcttcaaaactcatgaccaaccacactccctcctcacccaaacagaaaatcacagctcaacacttctcccatcctttaaaaggactgaatttccttagccctttaaacagaatgcattcatcagaagtaaccgtggcaacagatcagagaggcttcaaaaagcctgtctgtatgtaattaagaaaaatgaggaagagcatggagcttagacggggagaccacggtgctgagccctgccactgcattcactgagggcttttgcggaaggagatggcagattttctttctctgttctggcttccctctctgctcccccttgtaatgtttttgtttagtggtctcaattggcctccttcctggagatgttgctggggtcccagattctggatgaatactccctgcaagagtagggctccaagccaaggaggcaatgcctggatgggtagggaagtggcttagcatcttcctccagggaggtttatgcagacgccaaatctaccctggtcagactttcatttggccatagggagactgagcagtctacctgcaggaatatgcccatctcatcaggatgctacggcacagacacctggggccatcatcattttaaccacccagacatgaggccctggcttgccagccctggagcgggcctcatgggaataagagacagacagaacccagcattgttaggaggccatctgagccctggtgctttttttttcataacacttattcttatttaaaataatttcatttatttctctgtttccttctattctattagttttctctcactggaatataagctccataagagaataagcttgcctgtcttggtttttctgcctctcaagtgctgaaaagaatgccgggagtattagttacgggagtaaatgagtgaatgagtaaataatgaatggtcatttttttgtggcccagattctgttcacctccacaaatatgcactggcacttgctctgtgggaggaagaagacacacccctgccctcaaggaggcaggggaatgatacaccgcagggcatgtctggctctcctagccctctgagtccattctccagggaaggcccttaatgtctgtttctgctccttggaaggaagggattcagatttatgtactcctgcactcaacaaccatgaccttcacaagcccctgttcatgcgccacagatgcatttgctctgaaaagcacacatgaatgggaagggggcagtggctgctttatatgaagacgtttattaaaacaacatggaaaaaaacccttcccctggaatggggggtgggggtgggggaggaaactcactgcatttcctcctgagcagctgggagtaaatgaacagacatggagcagcatcgacaagggtgggtcttcccagctgtcagggaggccactagatgagagactgggcaaaactctccatccagctcttcatttgccacctttgcctcaccaaagcctctgccactcagagtaacaagcagtgggtcatcactgattactgctgctacttcaaggcctctccaaggcccctccatccacctacagcaaggcatcctgtctcacgctggagaggggtatatacatgggaccttttccatgcacactgagcaaaggtagaaaaccaggtgggagggcaaagtgctgtctggggatagtaattacagaaacagaccagacaactgcccctgtctaccaggaggctacagtgtggtgaggatgacaaagaggaagagactatcacaatgcaatgatggaatctgacttaggcacctggaaatgagctatggaagcccagatagggagatcatgactgctgggcctcagggaagggtcctagtggaatgggtgctagaccttgaagagtgagcaggagttcaagttgatacagagggaaaagaacttgtgacagagggaaaaacattgtgtagaggctcagagataagaagagagtttagtgtgcacaggaaatttcaggaacatttctattagccaaaatatgaggggtgaaggtcaactgccagggatgagatcaagaaaagcaagatcccacgggggcttgaatgacatggaaaggagggcaaccattttggatagtcaggaagcaggggggaaattgtgcagaagaacgctatgactccatgtgcaatttagaactcatactctggcagaagagactatatcggagaaatgcagaagcaatgttggagaattaattaggaggcttttgcaatagggtaggaaaaatgatgaggcccagaattctgaggccatgaggatagagaggaaggaacatgtctaaggaaaagtagaggaagatggacagattgtgctaatggtccatgtgttaggtgatacagaagatgtggctcccagggcctgactggtgactacacaggtatcaaagaaggtaaggattgaattgtgttccctggatttgtcacatagaaagccaaaggaaaagcagtcatggcagagaagtggggaagtaatcagacttcagttggctgagcagggagagaggaaagacagtaagtgtaggctcttgtttgcaaaagcttggctgagccaagagtaaagaagagagggtgtgcaatgtagatagatgccaggtgatgatgttttggtttgaaaatggcaaagacttgtatgagtttacattgagaagctggagtcagtggggagagtgtagctgaagctcaaaggagagaggaaataattgaaggaggaaagtctcaatgggtgagagggatggatgatcactctcttggtcagtgcctgcctctgccccttcacccgaggctgctttctgagtgatagcctcaggatgtcccaaggatgcagtgagataaaaagattcaccccacacctagtataaagcaagcactcagtgaatgcctttactttgagatgagaaacaggggcccgcgggtgagtctaggctctctgctatagaagtgagactaacaagagttgcgttgactgctgagagcttgtggtatgagtcccatcagtcagaagcaaacagatgtgtccaagacaggcagtgaccaatatggatggtaatgaattgtgcagtgtgtgtcaaggttggcccagccctgtaagagcctacctgggacagtactgactgccttcccagcactagctatgtgattatttgaaaagagatggatgtttattcctgggcagatgggtggggaattcttgaatgctgtttgcaagacttcagtaaaaatgctccatgaattctgccctgtcacatgcgtgcatgaacgctgtgctttagctcaggcctaatgggctttatatggtacagtactgattttctttcaagttttaatagaacccgatttaatatttgctttctgctctagctgcttgctgttgactgattcaacacagaatccttccctggtgccccccgaccttattgttattccctcattttttgtgttggcatttgattcctgtctccagcatgaaccactttacacatgtcttcgttcagctggtgacagtcacgtgcatgaattctgaatgcattactatctgaagcggctgctccagcagacctgccattcgaaaggggggcttccgggcaggattcatttttatcagttagacactgaggagatgcaaggctcaggcttgggaacctgaggctatgatctgttctggttttgggcagcagattctccaacttaatctcaaaatgcccagcattgtggccgttaattcagcaatattttgctcttctgtgaagcaccaggatttccacagttttgcaacaaggcatttcagtttttgccagattgtgaaaagtagccataaacagagctttccagaggaaagaggctgccctctgtgagtcccagtgagcctgtctggtttgtaagagaaggtctgttcagagcagggctatagttgagaacgtgagctttggaatcccgcaggtatgggctttcacactggcttcagttcttacagagctatgcgatctatagccagcctcctttctaagctttacttcccctttctattaaattgagataattattttatcttcctggtaggggtctttggggggaataaataaggtaatgtatataaagcagctagcagaatgtctaaacacattcctgtgttttcttacgtcatggggcccaaagtgactacatgaacctcttccactcaattctgcttcttttctcatgtgccaaagctggtccaatgtaaatatacatctattcaggtgctctggaagcctgtccctacagagatgcatccctgctaccacgcacacaccagatagatcccaaatgtgtgagattttgtgcagaatttcagaatatgttagggtttttggaggggccactcatatccttctacccttgagttctacaccaattaagattagacaaagaatccagtaaatgttcaatatatatacattttattaaccctaaacctggctggaggatgtggcttgatcctgagagcaaaaggccttaaacccaggtcctggaaccgtctttcccttggcacacatgattgaaagaagaaaagcctcagtgaagatgactgaaatgggagctagggacaagttgtcatctctgttcacctattcttcttttaaaatgaattgaagcatagccatttggggttgaggaaggagtgggaggcgagcgcactgatgaggttgggaatgcaccagaggcagacaagagagctgccggacaaggaagcttatgtctagcctcactggaccttctttgtctccctgcaggcgtcccatcaggtccccgcaatgttatctccatcgtcaatgagacgtccatcattctggagtggcaccctccaagggagacaggtgggcgggatgatgtgacctacaacatcatctgcaaaaagtgccgggcagaccgccggagctgctcccgctgtgacgacaatgtggagtttgtgcccaggcagctgggcctgacggagtgccgcgtctccatcagcagcctgtgggcccacaccccctacacctttgacatccaggccatcaatggagtctccagcaagagtcccttccccccacagcacgtctctgtcaacatcaccacaaaccaagccggtaagtctggaggcttctgtgctcctgtttggatgtgtggctggctctttgtctctaggcagggacacagctgcagccacacccatcctgcccgtgtactgtcaggcctctgcccaggagtgaaggtgtcaggtgatgggcatttgtgatcacatagagcaggcaggtgtagtgttgcgcttctgagaatgagctgcagactaggggattttcttgtgcccagcacaaaagcaaagaggtatatccaagccagaataggacctagtgctcttcatccagcctgagctcaacaaatcctgttggaaagatggatgaagagatggacagacaggtgtgtgagtggacaaacagaggattgtgtaaatggatggacagatggacagagggctaggtaggtggacagatggatggacagacagatggtgagtgagtggaggcactgaaagactttgagaacaggacgacaaatgatgctttatggaaacccaatgacagaaattttccagagatcatatgataaaatcaatattaccttcattttccaattaaatctatgtagttcaaaagtgtattctcctttatagcttgctctgatgaatgatatgctgctgttgagacctcagatagatggcaatagatcgctcctgatagccagcacatccttgtgggatgcatagctcagaacacattttcttcctctttatttctgaatcttacactcttctgatcttttctctttattacttttcacagctcttgcaagaatctgtttatttttatatcaatttaacgagtccgttcatgcacttatttattcgttcatcattaagagacagtcatttagcatgtactgtgtgccacgctgtggattagacacagtgaaggatgcagtgatacttggacactattgttcctcccatgaaactcattaactgaagaatttagaggatatagatacaaagcacaaagctgcaaggtaaaatgctatatgcatgcagtaaataccaagggagttagagaaaaatgagcaatctctctcccggggttaccgtgcaaggctgcagaggggaagtgaacatcacatgcacaggcaatgggggtcataggcagtggaccgtgatgctatttggaattatagatttttctcaattaacaaattctaaaaggacagcttgttagtagaatagcaggagccaagcatctatctctgctctctcttcctctgtgtatctccccctccctgacctcctcttttctactccatccttttctactcacctccccaccctcagactcattctgcttcttttaaaaccaggcatcttaggcatctttgatggcatatgaatcttgagtttaagctgtcagaactgagaagaaaaaaggtgtcgtaggagagcatgtctgtccagatggctgtgttgctgctgtgtgtgggtgtgtgtgtgtgtgttcatgtggtgtgtttgtatgtatgtgtatggtcacgtgtttacatgcatacgtgtgtagtgagaaaataagagtggaaatgtagaagcctccagctggtgaccacagtgttggtgccgtagagacaaaggttgtgacattttgtcttacccaaagaaaggagaatggtaatttctgcattatgttaagcatgtaacatgggcagcctttgttagcagtatttcccttgaagagtttaggcagaaaactggctgaaatattttagtgtcccagcttttgggaatgacaatcctgccaggctgtcatgttacactgggcttggctgtcttttctctctctctaagcatgtgcgaacaaacctgccacttatatcggtttgcttttatttctgccctcccttctcttaccctgctattcccgaacctgcccatctgcttgtcttgccatctgcaccttcctagactgcagtggagctgggggaccaaggctcttgcaaggggccctgcattaccaacatgcaaaatattcatttgtatcctcacccttttgcacctccatgagcacacttctcatgtgctttgttccccctctggcaggccctttaatcttaatcatccccgattttgtagtcctagcctccattatcaccttccaatctatgattccctgtttggtaactctggaattctggtgtcagagagtttacactcgctgagagaaggatgcaatttcttcttggtagcacatggttattgtaaaacaaatatcaagttgaccagtggttcctaatctatgggctgtggactgaggaacagggtgccatcgcactgatttgatgaatctatgtgtaaatacaaattattttcaaccaacagatagtatttttttaaagatgagaaccatcaaagtaaacattcaaacctgaacttctgtgagaacagtttagaaccatgaacagaagctatgcattttaccagaggtggacaagagactaaaaagtaggcatcataaaaactctaatgactcagatccattaagggctgaggtgggtggacccatgtgttaccaacaggtcatgacatgtctaaccttcccagaatacccctgagctggtccactctagctcacactgggtcagatctagctcagtcttcctcccctggcttcatggtatggtatgacccctctctgtgcctgtggccacctgtcctactgtttgagtcatgagtagctagatggcaggcaaagaatttgaccaagaggagtcctgggatcaatcattaagtcaacctgtgtttattgaatgcgtactctatgtctggaactgcccaaactgtgaagtggctggggactattgagtgggtcctgattgagaaatagatgagtaataattattatagttaacacctcatgtttgtgtttcttttgagttcacaaagaattttggaattgtgtggactcatttaatcctcataattacacaatgacttggggattattgttcctatttttctaataagaaagcagagacttaaagggatttggagaatctaggattagaaagagatcagcaggatgtcccttgtctgtgtctgccttgtggtgttctgtcctaaaagtggacagtacctctgggctccccatttcatagtctccaacaataggctcttcttgattccaagagctgtgatctaagaagagaccttggagatttttgctatcatttgttttttggtcattgggcacatggtagatacagtttttcactcagagacaggcttgtctgttgagttctgagattcagagagccttcatcttctcccatcatgaccccaattatgtatatagtcatgactattcaaggaccaggtatcacttggagagtttcaggactggatccttacccagtccaaaggcagtggcagagaactgacatctttgagcacctccaatgtgccaacccctaccaagtgttttgtttttgtttttgtttctgttctttttacagagaaggtgggtcagatgaagaaacttaggtcagagcagttttgaatttgctcagcatctcacagccaacaaaggattctaagaaacatcatttgcacctccctaggctgcagatatttctgagaaacatcatttcttggctgtgagatgttttgtggccattttatcctcagactgatgaaaaatcacattatagtggactgtgtaagtcgtaagctctctctaagctgttgccacattgctaggccattttagctgtcaaaaactgtccatcatctttggtcaggattggtcatgaattatgcaagctcagatttatgtgaggtcttcagggatacatccttgcactgaatacagctgccatgagtttaaaatagaccagatcaggtgcaactctctctgttccagtggccaagtgatctgcagagagattgttatcaccactaactcctgcagtcactctctggcatctggccccagattcagactgatggccggatcatctggctgtcagagagaattaagtgaatgacaaactttacttctctcttctgtcaaatagactcggagtgtcaaagttggaaaagaagacctcagaggaaatcttgggggtataaaagatgaatcagaccagcacatgagcttgggaccatctaagccagagaacaaactcaaagacccctaaggccaggcaggtaatggagaggagcaaagcagagccaggtacaaggcaatagagagtggtggggactgcagggaactttagaggcagccattgttcagctccagcaagagttgcatgcccagcactgcctgattttataagctgaaaatccagatttaaaatgttgacaactgattagaaaattttaaagcacttgagagccaaagaaatccaattctggatttagcctgttggcgatggtttgtaacctctgattcagagggtgaatctgattaacccaagtcttactgccaagcatgctctgttttccattctcattccaccacggggcagtcatcttcctcacctctgggctcatggtggcagagtgctgtggggtattcctggggttgcttcccctctctgctcctcacatgaatcatgcaagttcatttaactggcaagatccctcatttcttgcctataaaacaggtgtcatgatacctgcttcctagtactatagggacaagcaaatgagagagcagatagaaaatcactctgtaaactatgctatggactgagagattagcatcatttctgggaatatgtcttcagctagagagcaatttgccgtattttttctccctagactgtttccttccaagccttcacagtttctttgtttgggactgatgttatctgtatcagatacataacagatattggtttctccagtctgtgctgggaggggtaggcaccagaaacgaaagtagcaaagtctgtatcccagtgagctaatgatgaggtaggaagtggagcccagaacctaggtacctgccattggatgattctgatgctcagaggagcctctctatctttcctcattgtgtatttgaagaagcaacaattttcccctcacttgcatgatcttatcagcacaatttatatctgacatttatattacatgcagttcatgtatggcctgcgtgccacttccatgtggaatactatccatcatgcccacaacacagacacaacccattatttacttttcttttaaaaatgctgcactatttctgttaatagttacaagcccctatagtttgtccatttttaaggcacttttgaagttcttagacagttaaaatcactcagatacactaattttcttacaaaagaattacctagcccatcaattcctctgaatacatcacctaatttgcattattccttggttaaatatagtatttgcatgcataaagaataatctttgaatatgaaaaggaattttatgatattgcaatatattgagctctttggaggaaagatattatgtaaatctcaaaattaaatattaaaacaatattacactgctgcctgtaaaaatgtggagtgttaagatccatatgctgaagccagttcatttttaagggctgtgcttattggaaattagcaggcaaaatttgctccaacacagagaaaagattgagtgagaactttaaagactagaaggacttgaaagaaaactttcatcgaagttaataaagaaaagttaaaaaaaacttaagcaaataaaattttcactgttcttaattcaatttcatagtttgtttcattgctttcttctcattgttaattctagaaaattttgtttttattgtttcttaagctctggcattgggaaggaacttccaagtggcctcagaaaggccctggccatttgcaaacaatgatgtgttctccgttgagctcagagggtcggcagatggcactgcccctgaccaatgtcctggcttctatccttggcaacctcgcagtcctccaccagatggtgagctatgtggagagtcacactttctcacctaccaccagtttcctgagagagcagccgcacaatgccaggcacagagagccttgataaatatttgccagatggcttcagtccccacagatgagcattagtatgtaagtgtttggctggggagtggtgatgagaatgtgtcctggtgacccacaggtaacatcttaatatccctcccagattagtcatgtaatctggagtcttcctccactgtggctccttgcaggaaaacttagggaatgttgcttaggatgatgctacaagccctgatccactcagaggaacacagaagagactcaaccactctcaaagggattggtttgtttgggcattttaactttggaaatgtattcattcacttaacacattctttatgactgctcaccaagtactgcttgcaagtactggctcaagggtactgctttttaggggctcccatttattcgcctactcgtcaaatatttttcaaggcctttctgcatgccatatactgctctagacactgggaacacagcagcaaacataacagacaaaaatctgtgcctttgtggagcttgcattctagtcgacagcactcactgagactgggatcagaggcccagaaaagtcacaaagtaagcaggtgactgattgggaagtgacttgatggggtgcaggaccctcagctgggctcttggtaccaccctcttctgtggtgcccattcttacatttcaaaagttaggatggaaccacgtgtcgttgccagagagcatttcagtttgtggtggatgttgctatacagtgacaatgtgtttgatgggatattttattgttcaacagaccagtttgaatgaactccttgtggatggatatcacacgctgggacacacagtggttgggtatgggaattctccttccaggttgtgagcagtggcttgtgatgctgctaatagctccagaacagccttcactctgctaggagtaccagagtgcccacaggactcagggacctatttgcttgtttactccatcttggtccaggcactccaagtacatagcttcaggagtaaaaatggctactgacaatgagactggaggaaatttcttaccctgtaaggatctcatatccacatgagattgttataacccttattggagaggggacaccagttggattattagatagttgctgttcaccttgtgagctatcccataaagaggcatctcataaagaggcaaagaggatgggagggaggagggtgcaggtgatccatcctccatgctcctgtggcaagtcaagtcaactccatgaactgactggcatctccaggagagaacgccctgtatccatcctgttgactattgtgtccagataggcgtctagttgggtacctgaaatatagaaagcaatcaataaacgttcattgaatgaactagtaacttgttaaataaatacatgaatgaatgcttcagtctttcttaaagtaatctcaggcatcagcaaatggtgcagctttagctgtctctgtgatctttcctttatcaggcacctttgggtggggagctgtgattgcagttaccccttacattctcccagatgttggtaagacctcaggcttcctgtgtgcactgcacccccaaaccataaccatgttctgtgagagttgctcttctatgacctggcctgtcctacctcccccactggcagggtcccagctgcttgagcaattgcagggagggtggttgggatggcatcccagcactgttgtctgtccccctgcatgccagccccgcgcctatcattttcacagtaccatccatgttaaacaggcaggagcaccaggggtttctgaatgcagcaattaacaaaacagtaatcaagctaagtgtttaatttcagaaaattaacatcttctctgagcggatgtgaaagatggaggaaaaaggcacattgaatgttctgggtaaataaaggcaatgctggaccacaaatatttttcagtgcaaggtaaactctttgccaatccctcaggcctcgggatcagtttccttctggtagccaaactgcaggaaaacctttgctgtagaattgagccttaggattttaaagcgtgtgcgcttctttcctttcctttttttttttttttttttctcttttttgatggaagagcaaacgctttcaccattcagaacagcttgggggaacaacagcccagtcatgccccctaagagcgcatctgccctgtagaaacggtgacgtatgttgcccttctctgaattgtgcttgttaaagggacaatacagtgatttcttggatgtgcatttgttgtttatgtgcttaggctctatttctcttggcagactgagggctcccaagggaaaaggccatgtctttctcctcccagtaaaccctgcccctcagcaatgtgtcctctgctataaggtgtcctggctgaccttacaccatgtcacatgctggtgctgcctcctaaaccagcgggctggtctttgtttgcaggaaggggcttgcatgtagggaaggaagcttgctaggaggtgggtgtgcaggagactgggtccctagaaggacagtgaggtcctgctaccatctgtttcatcatctgatggcctggatgggagtgagtgcctaggatagaggattgggagggcaaggaaagtagctttgtgtgaggcatgctatgaagtttgaggcacagacaggcagccttgagactgtgtgatgaggtaccaccagtaaccatggaggcagggctctcagagtggcattgagcctggtgctgcctgaggaagcactgaaaaccatgttcccacaggaccacaggtcctcagggaggggcctggccatctggcttaataagcagtgttccttgaggggtcttgaaggcagctgacatggagaacaaagaaagcaaagcaggagaatgagagtatagtttgcgagtacagaggagacctccccaggggctcccagaagtattcagggactgcatcaacagaagacaggttcgattctgcacatgcataatttgtggagagtttgagtactcaaatcaggatattacttatgcagttggatattcaggcttctattttctctggaaggtgggaaataagattggttgctgagagtgaagggggaagtattggggttgaaagtttgaggagaatggaaaaggcttggcagtgctattgaagagaatgggaaatggaactacccaggtaaattcaatatttctggaaagtattgagagctcatttgaagttggtgatcacacgtttagaaagccacctctttttcctcttatgtggctttctcagcagtatatggttccgggacagcaggccctacaagaaacagatcacaaatatacctctggttgagttttgacagtcatatgctctgaaaagataaaggcaacatatgcctaaggttttgaggagtattgtgaattatgttattgcaaagatggagcctaagatggataataatggatatgaataaaggagaaggcagatgcattgggtggaagtaaaggccaagagtgccagatgaagccaaaaagagttgcagtgggctcatctgaggttgtggtgaggaagcagaatatttagacttgtgattttgaaaatcgagtgactttaggcaaagcagagtctaagtgtgccatggaaattggcaggcatggaagagttgtagaggccagggaaccgagattatattgtttaagtggacattgaactcacacacaggagggcaaggctcagggtagagaggaagacaaagactgaagctcatgcctccgatgaatgggggcgtgacggtgggagggagcatatggtggtcccaagacctggagagtggtggtctagccaaatggcatttttgcaaagggtgcaggagatggcgagtgatggtgtgaaagagacagtggggagcaaggatgacacaccccacttcctgaccctgaggtgtgctggatgcaaaatcataaactgtcatcaggtgagagggctgcaaggcaaaggtgtcctcaagggacagctgctcttccttaatgcaggcatggagtgaaggctctgagggaaggaggtgggtacaggggagtttcctgatttgtaagtggagggcccagggtgggggtgggctcagtagtcagtgggaaagtcagaatcaagaagaggcccacaactccatggggctggtgatgtccagaaaggggctaaagagtgggcatggcaggatggaagcccgcctgtgcagcctggtgggctgctctgaggaggaggggctctggaccttcaggccagaagactcagacctccaggcctggaggaggatggtcacagtgactgcaggtgcagctcccctgcccagcgttggtggcagtgatgtcagccttagggtggtggtggtgggtcctccagctgcattaggggtttggctgaatgtgtggggatgagagccaggtgtaacaggggcacacaacttgcggtggggtatctcctgtggcctctccactgctagtgtttggagtggactgccgttcatgatcaatcattaaacagaccaaagctgccagtgctctgctcttgtcctacacctgggaaaggctggcaggcctgaggggaggcagaggccagtgacatgccccagttgacatgtgagtaccaatggttgtgtcctcagcagccatcacagtgcttagatgcctgcctgaagagtatcctgctccacagacacctccacagcctcccatggttgcagggtcacagaatgcaggtttgctatagttttcacataaatggcacattctaagacatcttttgattcccccagcagggaggaggagctgtggaaaactgccaggttgcagtgacccaggaggcagaagtgccaccaggaacacactgcagcctgcctcctcctccaggcacagggctctgcacacttccaccataggtggggacccctgatctccctaagtgcacaaggggtcccagaaggcagtgcccatccattagtgatgctgatgtaactcaatgtccccacccccatgcctggcctcctcaaggctctggaaatgcagagtgcatgagttgtggggagggagccctacactgatctcagggaaaggaggcccagctgtttctggttctgcactaacctctggggacttggggaagtcattttcccctctcttatcttcattgctctaatctataaattgtaagagttgaccaaaactgaatggcctcagatgccctgtcaaactttgacattctgatttctaggtttccagacaagcagttctcaaacttgagaatgtgtcagactcctgtgaaagacttgttaaaacacagattgctgggcccacacccagagtttctgattcactgagtctaggatgttgctctagattctgcctgtcttaccagttcccaggtgaggctgatatgggactacattttgagaacttacagggtcagatatatgatcccaataaagaatgccaccccaccctcaaacacatacacatcaaaggtaacatcagaagtgagggcctgtgctataaatccacattcccagatcagccaccaaccctcaacccccacctgtcaccccccacattcccctttggcacggaaccgaaacccttagtggatggaccagtgaaggaggagcctgtgactccctgccttggggtgtgagactgaaggccaggcatgaagccctcactttttatcccattcacatctaaaattcagccaggattctacaacagcacagagcagagctacacacccaaggaagtcctctgtccccaggtgactcccagggtaaggaggaagataggaagggaatgtcagagacatctcaaggcaaagcccagagtaaaagcaaacaagaaaccaatgtccacaatagaggaaaacaatgagaagaataattaattctgcttttgtatttatacccagtctccaaattaattgcttatttgtttaatctactttgaccagaagtgttactgcaccaaaaatatttaatgagtcaggtcttctaatgtaaaattcaagcatatttgggcaatgaaatgagttttcatctacagtgggagatccagctatctaagcaggaccttttcagcaaagttacctcctagaatagaaatgtcagagggaacacagttcatctgtgttgcaaattgttcttctttggtcatgagtactagtgggctggaagtctttagttgacatttaaatacaaactttggttttttgatatgggaagtgtttcatatatttaaaaaaaagatggccagccagcccaatccttcattcacaaccccatcactcatagcttctaggatctcacagaagtccctcgaggggacttctggagactgctcagcattgtttgggtctctctataaacttttcagagtctgggttggggagatagaaaatggactggcttcaaggccctagcagctctgattcacccagagcagctctgcattgttctgtttcacactttatacttcagggagaactttgtttggagaaaggatttcatagctttaaaaaatagaaaactgccaatattagggtaacgttacagctgaacaatcccagtgagatggggagggacccagcctgctaggtgtcttcatttacaccacagagaagaacttctatctctaatcccttgggactaccatattcaggcctattctatgttctttgtgagatgcagtctcaaccctgctgactcaaccctgccgagtcacaaccctggctcccttttccacctcatgctccttcaaaggccaatattcatgtttgttagaactaagggattttctgactccttttacctctgaggtctttagagaagagcccgcaatcattgcagtaagagtaaatttttgttgaacatttattatgtgctagcacagtgtgaagaggctaaaaacatggtccttgcctaaagactttattgcactgatggagagcagaggtgagcacctcggaaggtagatcacagtgcactgtgtcccaaagtggagatcacaccccaaggggctttgggttgggaggcaggaaagggcactctggtgggcatggtcaggcaaggataagcagtgtggggcagtgtgaggctccccctgtgccttcaaaggccggcaaggtcaagaaaagagatgcccacagggaatggaattagggctttttctagtggtgagccattgaaggtttttagcattggagtaacaaaggtaaaattgagtttagaaagattaatatggctacagagtagtttgaagtgaagaagttagaggtggacaagagagttaggatggtaagtacatgaggcacaatgagatacaggtgacgagacctgtggagaggcagtggcagggccatgggagcatcgggggctcctgggcctgagccacacattagatgggaaggctatgcttgttcactgtccagagtcactcggtctccttatccttagggacaagataccctatcacttactttctaggttgcttcaggttatctcaaaatgttcaagggaaaccagctctcttctggagcgtttatcactccagcctctggggaacccagctctttgctagcttcccctttctccaagcccatttgtatctatcacatccaccatggcttggtcgacatatttatatatcctctcaaagatatttatcagataaatacctgaggctgtctctggatcccactttttacatttaccttggggaatgatgcccagtgattgatttgcatatgtgaacagcagtggacccagaaggatagtttggggtggttgccaagtccccagcctggcaggtgggatctggttgaaaggagcaagagaccacacagagaacatcttcaaaacatttgggaaattaataacataagaattaatattcctattttacagttgaaggacctgaggcccaaagaagacaaggccttgggttaaccttatcccaagatcacataataagcaaatggcagagccagaataggcacacacatctctctgcagcacctggagggccctgacaacagcccttctttatttctgctaactcctgctgctctgagctgggccctaggctccttactattccttaccttacccgttttcttcacagctatggtctgtgctatagatcacaggtagttagtccaaggatgatttggctgggaaacgctgttctagagagaatagaagaggttagtattaccatatgatccagcagttccaatcctaggttgattcccaagagaaatgcaaacatatgtccacacagaaacttgtgtatgaatgtttatagaagcattattcttcaacttgtgtatgaacgtttatagaggcattattcttcaacccaaatattcctcgactgaggagcatttctcccagacaaagcaatgccctatgagggtaaaagtggttaccaagccttaggttcacactgtgcaggctggggcagcagcatcactctggggggtcactgggagggcaccctccaacacacacactgtatggaagggccaaggaaaactactctaccctgtccacccatgagttattgtgttggggaggcagatggcctcctctttgtatgggtctccttgggaattttagatgtgaaagtacctctcactggaaacagcatttgccgtctagaagagttgctagagcatttgcccaagctaaggcagaggcagctcagctgtgacctacatcttcctagagctggcaagagatgtcctcaaacaaggctgtccccgtcacaatttccacccacacacacaacactgttttcccttttagataagatttgctgaactctgaaatctgagtttcataattttataacctctttaaacattttactccaatagatcaactgaagtctgagtgtatgtacgttaattttaacacagtaaactgttatatcatttgttaggtcccaaaactgattatggttaaaactgttgaaagaagtattttggcacaaaaatcaactaaaagattgtgaagtatttttaataagcattgtaatgtattaaaacttagtaattgtcctagaaaaaaagcatcaagtaaatcttgtatttttggaatctgagatgcttaattgttggaggaggatgcccctatcagataaggaaaacaaaatgagtaagaagaaacctttgaagataactgagtcggtaactaaattaaagtgtcaaggaatgtcataaacataaaatgcttggcccacgtgaacctgtgatatgacagtaaaactcctgcacatcagaactctaggatccagagtctgggttattaacttttgagatagagtcatgccaccatctcagacccagcctgagtctcctgggacttcacagttccctttgggaccgtttgtacaaatggagggctgtctggtggtctgccaggctgcatcttcgatactactggcagtgaccagtggtcagtgactagtttgggccaacatttgttccacgtcatctgtgagctctttcacaacttgcagctagggccatcctgtccctgtaatttattcacatctcctttgtcaattcaggcaagaacattctgtgctcttcctctgctgtatgtgatatactatcttggatctgtctgctttaaaagcaatttgagagtaagttttccccaaagtctttggtggcaaaaacagagacaaaggactcactcactcagcctgcctttgtttttctccatcccagagccccttgaccagtgatgttttaattctctttctgcttctgacacatttacaaggccttttattgttggctataactctcttcttcgacactctcattctgattctgtttgaaccctagttgatttttccttggagtctgatgacactcttctttgctctttgctctcctatttgggtgcctgtactctgttgggtcagcctcttcatttgctaagaaagggtgcagggcacctttgattccatttggatttaccgggcactgcctctttagacctcacacatctttcttgaaacttcatcaggttctttccaagtaaccccaaactaagtctttctgcttacgttttctgaagaagggtccatatttgtttctttgctaaatttgaataatcttgtgaactctttattttcatttctttctctcagtagaatgtgtaatttattcaaaacctttatgtgtgtttgccaaaaagagactctttcagatgttcaagcaaactatcccttcatctgaggaatatagagaaaagacaattagccaggacttactgtgaaaaccattgtatatgggggcaaaaggggatacttctttgaattaatcttctcatccctctttaatctttagctttagttttgctagaagaagttggtgtttgagtgaataccagagctcattcttattattttctgttttgtccgaaagtttcatagcacataaaacaacagatcaagaggtgacatttgcccttggagagggaaaaaccaaattcatcactgcaggtgactgttgatggcagagcactgaacataagctgcccgtgattttcagggaggataagaaatgctttcttgctttctcccatgtgctaaatcccatcgtaataaaatgtaaaccatttagaatgacctgtgtgagaatacacagtcttccacagggcctgtaaccctcatgtcattgccatgaatctgagaaatacaggcagggatggccatcaccctctggcagctcttcccagacccgagtgccgctgactgctggggagtccataccatgtgtagtgacaggagcgtttctctccatggatttcactgtcagttgcctctggatcactctgccctgtgattgcctctttaccatctgaccccaactagactcctgcacagaagtgcagggctgtgactttcttacttgttcttctgtccccagtgcttagaacaggactggcacagtgtttggcaaatatcttgagtttttaatgatggctttccagagagtagaggcaaggagaagaaccaagcccggcaaaatcctcaggccattagcattgatctttccattttttaaatacatgatgtttcagctctcaagacagagggactctgaagtcctgtatgaaactgacgtgattcacaacatgtaaattgtgcctccgcagaggtctgcaagggcagcctgagagtcacagcgtgcagtggaaggaaagaactgtcaggagctatttgttcaccctgtctttgtggacccactgggatcctcaaatgatctggactgattccagaaaactgcctcgccttccctgaactgtctttatcctcccccatgactctgtcccgtgattgcaaggtgttgggaaagatgatcacaggccattcacatatttaaccatcaagccttgttgctaagtccaggactcagctcttactttcattttacctgacttagcaacagcatttaacgtattctgtcctcctgggagcaccttatttccacttggtttctaggcgatcacactctcctggtttttcttctgcttcattggtggcttttccttctcaggcctctttagtgttttctcctcatcttctgaatcttgaattttttctatctattgattctcttggtgatctctgcaagttccacttatttcaatatctgtgaaatattggtgactccacattggtctccaacatggaccttatgcacctatctggtactcagcatctgctctgggacaccttggacatctcaaatctaacaggtctgaagtggagcacctgggctctcctctcaaactgcttctagaaatgtctccctgttctcagttgatggcagccccattcttccagatgtttaggccaaaacccttgtagtcacttgactcttctgtttcttccacatcccatattcatggaaatattctaaatagattcagaatctgcctactgtgctgctcaggccaggtcttagcagccattgtttcccagctatattactacagcagtgctgtgattggcttcctgcttttacatggcccctgcattctatttggagcacagcagagagtgataatagtatcatataagtcagattacatcaccgtgccttgttgacagtcctcctatggccctccagcttgctcagggtagaagccaaactccttctagtgtccctcagggtcctgccccctgtggactcctctcttctgggtcccactgactccctgatgcccccagatcagcccctttgtcctggctgctccagatacccactcagctccctcccttccctccttcaaccctgtgctcctgcatctgcttctcaggcagccttccctgatcacacacctctcacctctggcatcctgtgtccctttcccctttccattttttcatgtacttaatatattttaacacagcttatgattcatttattagctctagtctctgctgaatccccccactagaaagtaagctctatgagggctagaaattttattttgttcactatggtgcctctagaacctaaaaagtgactggtacttgacagatgctcaataaatatgtttaattaattaattaacctgggttatagatactactaagttgcaggcaagaaaaaatacacttgacagcttaatcaagataaattatttccacttactaaaccaataggccaaatttaacaccgtaaaggttgagatacatgtacattctcatagtcaaagccaaaagccaactctacagacaaaagatgaggagcataccatggggaaacctaaaggttatatataactgccatttcaggactgaacagcagggacatgtttttgatccaaaggctatcggtcatattaatagatatataatacacagatcatgatagatattagttttattctaatctttgctgctcaaatagtggaaagagaattggattcacttccaagccccaagcctaaggagaatttagggaacatggtctcatttggaaaagagccatcttgggtggcatgtaatggtcatgggagaaatatttgactatttttttttcagcaggaatagctcaaggaagatctaactagtttccttagatatttgacaagacattttgtgggagggggaacatcctttcttacttcagttggtagaaaggaaaacagtgggaagaagataactttcaaataaagatcggaagatatgtaaattggtgagacttacctaagtatagaacagcagctcctggaggcaagaagtctcccctctctgggggtacagcaggagcttggcagcaaattcccaacagggaagttgtagggggaatcaaaactacattaattcagaccctccatgaagcagacacaaagatgggattagatgtatgaaagatttactggggaaatgagatgggagtcagaggaggctgggaaagccatcagaccataagaaaggtctgatctctgtaaaggagagagggaaggaaggaggattgggtagggtaggaagagctttagcttgctgtgggggttataaggtagtgttggaaaggccactggggagtctctgattggaagttgcccatcagagtagtcccatatatcgcaggaatgggtctgccatggcatccctgctgctctcattcattggctgggagcagcctgtgggaatcagggcctctgtgtgaatatggtgatggactgcagagtgcaggaactggagctgttagttaattactcttcaaggagtaggaactctgagaggtgcatttcacagccaccacaaggtctctaatgggaacagggcatacctgccttcaaggtcccagaggacactctggctctgagtccttatcacacttctaactctttatggctttcctggactagcagcatcttcagaacaagtgctctgcatcctctccctgaggggctgcatgtagtagggactcactgagggtccaatgagtagtggagaaagcagcagccaccttgtgaccccgtagttgtgcagtgtaaattccaggtctttgagggcaatctgttaacttgaattgaggatagtaaatgtcactcagccacggtccccagagaaaccattgtaaagtggagtttgagtgaggaaaagaccttcatcactgcagaagtgccaggactaaacggaacagcccctgagcagagcacagattgaagcctcatccattacccacctcttcccctagaaagacagccctcatttattatttccagactgttttcattttgcttacaccatgtgaaaaatgttgaattgggaaataaataatattatttccaaacagagatttctgaatcaactttacagattttggaattatcttgttcccaaatgtttgatttgtttatcatttcttcatttatacttgtgaactccttattggaaattccctcatttggaaaactctgaccatacctctgttgttggtctgtgttcatgtctttttgagagatacctcctctcttccttttaaagtataataaaatctaacttgcagtatcaggaatagatgtttgctagaatgctcctttctgttgtagagtaattctataccaactggttctactctctcattatcatctcttgccccaggttctcatctctgcaatagctcagcccacaactgcaagactgaggttccttcaacaccttcttctcaaaaacattacagtgttcctcctttccttcagtcttttcctttgattcctccaactgtctcttgttttggtcaagccttgccacctctgaaagtcccatgtccattccagctcctgtgcacacatgctttcctttcctaaatgctaccttctctctcctctgttatccaatctccattgattctgcaaaacccacaggaagttctgcaggtccagctcagctgatgataaagaaggagcagagttcaagccgaatgccatttttctccctacgtacctctggaagatggcccttcccctataattgagtgtctgttcagctaccctgtttctttctctctccacagccccctccaccgttcccatcatgcaccaagtcagtgccactatgaggagcatcaccttgtcatggccacagccggagcagcccaatggcatcatcctggactatgagatccggtactatgagaaggtgagccagctctacctgcaagcttgcaagacccaaggccagccactgttccatggatggttgctagctgaaggcacaaaggagataggctgctgaggtggggaggattctggtgacagaggccagaaggtccctgggagagttctccaggtctgccctgacaaagccttgttcaaagcccaggcactttctgtgccaactaaggagagaaacttccagtccaccatcctgcaatctggatagttcactggctgggaaggaccagtcccatttttccagtcacatgtttgatatactaatgcagatgccacaaaactgccaggggtccccgaaccttcagaggagtgtgtggtttggtagatcagtgtttttcaaagtgtttgtgtacctccaaaataaatttatttataaattatatgcatgtactactgcactaatatatttgtggaggataaaaaaacatgtaaagtgaacattcaaaaggatgagataaaaattaacagaaatataaatttatatattattttccttgactactcttgagcatctgcttctgaggatgacagtggggcatggggctgccaagaaaagggaaatggtgcctggtggagctggtccctggcctccctcttaccagggcaaaatgcagcatttgcaaaaatcttaggaaaatacagtgccttccgttttaacccaacacattatttgtaaaaccacattattcattcacttatttgttcagtaagtattgtcaactatttgacaggcactattctaggatatattagtgatcaaggagacaaagattcctgcctttgaggagcttactttccaacagagggaaacaggcaataaacagtgaacataacacataagaaaatcatatagtgtgttagaaaatcaacagcatagaggaaaaaagagaaaaaatagcaaggtaaatgggatcaggagggttaggcttgggaaagagcaggttgcataattaagtagaggggtagagataggcctcttggagaaggtaagatctgagtaaacctgaagaaagtaagatcgttgtgaagcagttatctggaggaggaaagggcaacagcctatgcaaaggtcctgaggcatgatcatgactggtgattcaacaagcaggaaggaaaccagcatgactggagtgatgcaagcaaatggggaagtaatagacagatgagagagattaccagaggaggtcatcatgttgggccttaaagactgggccgggtgcagtggctcacacctgcaatcctagcacgttgggaggctgaggcaggcagatcagtggcgctcaggagttcaagactagcctgaccaacataatgaaaccccatctctactaaaaatacaaaaaattagccaggagtggtggcaggctactcgggaggctgaggctagagaatcacttgaacccaggaggtggaggttgcagtgagcctagatcacaccactgcactccagtgtgggtgacagagcaagactttgtcaaaaaaaaaaaaaaaaaaaaaaagactggagcttttccactgagtgagatatggagctatagcaggttgaggagcggaggagggacaagatctaacttacattttggatggatcatttaagctgttccactgaaaacagagcctagtagatctacaattattaacgaggatgatggtgtaatcagggtaaaagcagagggctgttgaaatgtagttgatttccagatcagctaaaggcagagccaacaggatttccagcaagttggatttcgggcatgggaaggttttagcctgaaccactagaacgatgtagccggcactgactgagaaggtgatcactgtgggtagagcatatctgatgtgaggaaaggaacagaagttcagttcagtgtctaaaatgcttgtaaaatggccaagcagagatgtgagataggcagcaagagattcacatctggagttcaagggaggggaccgggtgaagatatccacctgggagttgtcagtatgtagatgataagaaagtcctgagcctgggtgaggtcttgcagtgggtcaatggaaataaggagaggaacagaaacagagacctatgggcctgcaacagggaggccatgctgaatagtgggacatgactgcactggcagcagaagccctcgtttccagtgccctgtgcagctaaccagccatggagctgtggtccaattacttaaccactctaggtcacagttttacatttatagaatggtagcagtttacctccctgaaagcggaggtctagatggatcaccaatcccagtctgtaaggaggtatgcccttcagccattagagctgaacttgcaagcaaggtggaggattaagcggcattctattctacttagagaatattgagttttataaggagttgattcagatacttcagtgaattggaaataatttaaaccagctgaattcataagcatctgttatatctgatccattttggatttagggctcttacttgctagatattttttgtcagttaatgaagtaaatgttgactttttaacatattttggaacaatgtgtttagactaactgaccacatggtctcattttgtcatcagagttggcctaacaagggtccacccagtcccccttcccacacatataagcttgtagctctattgaaataacacctcatctcagaaaaacaataataatttctccccagcgtgcacctattgtgtgccaggggttttataaacattatctactttcttcctcacatgccagtgtggtaaatgttagtatcattgctatgggtaaagaagtttttaaaaggaaaacaaagaagttaataaaacaaaaaccttgtccagagtcccacagctgggaagcgagcctgggtcctttgccctgcagcaggtggtggtgctgggaagggaaagaatatgttagagaccatatactcctcctcttcatctgccgtgctcagagcagtcacttcagtgggtagccagggcaggggtcaagggcttaatgacaggccgagcactgaagccacgaggctcatgcctgtataccttggctccttcctcccaaaccagcccaagctcctctactacctttccctttacagctttcccttgaaaactgtaattaacctcaactttttatgctgtaaaagcagcttattctcccattcaggctacctccctgcttcttagtaatttgtactaattattaacagacacacatacacagcagcccaatgcctgcagcagcttccacacctcagtgaagcatattattgtccccactccagaggagagaatgctttccttggaaacagagaaggttctttgggcaaatattggttaccatttggtatacgactgtggaatgctccttcacttacgaagtgcttgactacaaagtccattacattgctttgactattcctaagactaccaaagaaaaagatgttagcccatgagggccttttgaaacaatgatgataattcatcgtatgttgagtatctattatgtgccagatatacacagatatattagctctgatccttaaaggaaaaaaagtgtatacttgaaaatatatataaccaacttatagatgatggagctatgtcatagaaacattaaatgacttacccataacagcacaggtcattgctagggagtcacagaaccagaactttacacatttttatgatacttcggtggtggaaacttctgagcttgataggagagtggatgcaagcacctccgatgctgaggatctcaaaattagtgtggctcccaaaataagagattgtatcttaataaatccaaatacttgcaaacagaatgatctgcttacctgctccatgtggccttggaatcctggtctttagaagatgtaaacacaaatagaattcagcacagtagatgtcttggatttggtccaaagaagcaaaccccattatttcttcatcttgtgccatctcctcttcccccaaggaagtcccagcccctcatctaaaccaggagtcagcaagcttttcctgtaaagaaccagaaagtaattaatttaggcttacgggccatatggtttttgccccaactgctatagtcgactctgcctttgtagcgggaaagtagccataggcaatatgcaaattgatgggcatggctgggttccagtggaactttatcaaaacaggtagctggtccatgagggcagttttgtaacccctgaaaatcttccatgggtctcctgctccacataacccttggtttgcgcttaggacccctttcagtttcactctatgaatagaattgatgaggcttttgcttcctccaccagctcattaatagagagctcagatgccatcaagctgatgacactcctggagcctttcccatgttcatctccttccccattttaatacacttccattcatcattctctcttgtttactgtcgtgtagcacttttcactcctggtgtcagcgcttgtagacaaaccataggaggagcatctacatctgctctcagctgtcttaatgattaaacgtttatggttactcgctcttcataataactatataggctaggactggctggtttaggccttggtaatttctacctttcaaattttaggatcgttttctcatagagactctttcagaccttggcaatatcttgtgctcaatcaatttgttcaaataactggaccgaagtttactgtttatttattcatttggcattgagttgttgagcgcccaggtggtacaagcattgcgctgcatattggggtggggaaggagaaatgagggaaacatggtttctgccctcaacagctgcattctccatcctgcatcctctgtctcccacatacttataattagtcataagcaaccaataataataaaaaaaagcaactttgttcatggctcttactgatttgcctgaaattgattaatgattttgtggggaacaagaactaatattcattttaatcactgaacttcttcaagaatgtttggactataaagtgattatggagtaatgtttggtcctcacaatccaaataccaatgatgtattaaaacagtttttcaataacagctatccagtcactgcttcatatttatcagccagtgcctgatttcagcagattctattaaaaccagagaattcaggcagctgcttggattttgtagcaatgggattttattcttatttgcaaggtgacttggtgattttcacagtttcagatctcagatctccactgtgtcaaagtagaaatgatcaaagttctggatgacatcccttctatagtggacagcctttcttctgaatccctgagtgggggtggggaggatccccttgtgtttaaatagatcaaatagtgggtgggcagctcctctgcaggcaatctctcccagggcccagtagacatccccttcattagagtgagaatgggcctctttgtaactttcaactgtgtgtttgagctgacctgggacctgtggtccctcacaactgcttctgaatcatttatgggcatttctatgccacccacacttcagatatgccaattacttgcagtctcctgaactcctctaggccgtgcttttgcatgtttaattctgttctcactctccacattcatccatgtggctaatttatttcatcttttgtgactcaactcaggtcaccctttccctcagtcactctgcatctcctctgaagtctgggctggatggtcccctgctgtgcccccacaatcccctgaactgctctctgccaactcactcaatcaacactgctgtcatcttctatttatttaccagtccacccacagatgttacatccccagaggaaaggaaccatgcctttgtacctgcagcccatgtatagcacccagagatagtagtgtgtcataaatgtaactggctggccaaacgaaggaatgagtaaataaatacacatcaggtcatctttgacttcacaaagtaggcttttatatattttaaacaatgggaatttcttatcactgtactgtattctttacatatatttacataaaatatattctttatatgggaatttcttatcactgtactgtatcctagctcagctctgtttcttctgtcattttaccaagaatacagtttacaatttgtaaagcatgcttcttgaaccattgtgcctagaactcatctcagtaccccagatctgcacaggggacacagggacttggatcattccctcctagtgatccaggctcttcattttcactaaagtccccatttttttctaggattcatggtgcagacaaagacaggcccaggcttcaagcttctgttcatgcatacctgcagataacccaggatctttgcaaagaaaagatatgctcctgtgaaaatgattagaggccatgttggtatacaagaaggtgctggggtgaggtgtgattcggaatgacagtgtgtagacagtccacagcccagactggtgaaagaagccttccaagagaagaggccttgggaaacataggcttaagcaatctggagggagtagaggagccctggagagaggcattttagacaaagaaaagagcctaagcaaatgtctgctggcaaagatgtggtccccggatttaggggaatgtgagagattggaattgacttcattatgaaggacctgtgaatctatatttaagagttttgcctttgtatgatgatagtttttaagaaaagaagtgtggcgttgggtggggtggatggggaacatcaagaaagaaaggaggctgcaaaagtccaggcacaaatcatgtgtttaataagataagtagcaaggagaaaaagtcaccttttaagggcactcacgatgagaaaaagagtcatgcttctggaaaacagaagcaactctctgcacatcagaggacccaagtgtgcagatgacagggactgtagaggtcagcacagaaagtgctggagagagtgacagacaggagaatggggctcatccagagtaggtgggggggatgaggacacaggggctgctctgcagggagaaggcacatgcccgctctgaatgctggcggaaagtagctgggggatgcactctcagacacagggcaaggtgagggcagaagtaggtgtggagggcagtccagaatggcctctacctctccagcagagtggacacaaagccttttgcctgagcacttgaaggaactgaaggggagtgatgtagaacaggcactttggagagtgtctagggagatctgagtcaggagagaaaacagaacaactcagcagaagcaagacaaagagaggcaggcagggggcagatggatgttgcctagtttgagtctgctgaggtcagagacttgaggggattttgcaaagctggatgtgctatgttatttcacctctgaacccttggggaggaggactagagaatgacaataagcttcctcgccagtccctgagcactcagtcatttccctgggccccttttttcagagtgtggccacctcatagtccagacctgaccctacattcccttggcccagatcagacttcttgtccccatccagagggatggcctggagctgatgacaactgctagcagatatgcaggaccaagaaatgatggggcctgaatactccagggtggagtgggctgggggtgtagccttcaggaatgggatagtgaccctttcccttgctttcttttaggaacacaatgagttcaactcctccatggccaggagtcagaccaacacagcaaggattgatgggctgcggcctggcatggtatatgtggtacaggtgcgtgcccgcactgttgctggctacggcaagttcagtggcaagatgtgcttccagactctgactgacggtaagggtcggggagggcagtggcataatcacagggcaggcagtgtgggagaaaaagtagccccaaagatgctgcactagccaaaaatgctgatctccaactggattccagtggaattcccttcaaacggtttgcctcccagtagggccatgtagattttcctgatgtctggctcatttctctcccaacgcctggttggatttgcctctgaagggtctcttgccatgtgtgatcttgcatttcagcagtgagactcatacctgtctcatggagccagtgtgccctcttgcctaggtatccaggtccagatgcctctgtttcaccctcacgcccacttcactcctctgtgcttatggtctgaaagctgagctcatggcctagtttcatgagccaaggtcttcagggaggaaatggagagacaaaatgtgggatgtggcagtctcatgcacctgggatctcagaaatttgaagcaacttcacatgtgacccccagtatgtcctgctcggatgtctccagagagaatagccaaggtgtcctcaaggccagaaagtctatcaccataaatatacttctacctttgggttttattagttccctattatcactatctgccccactcctctgagaccacccccagcaatagttctgaaaaatctgatttcccagtagcctcagcattgtgctcaagtgatctatctgactgtgcctaccactttctctctcttagctagccatttaccatagtttatgtaattatttgtgtatctgcctacctacctatatatctatatttattattcacttatgagctgtttcctgatagttttccaaatgtcagtctattcctgactccccaaattgaaagctttccatttttccttcattaattaaattatccataaaacagtctgtccttatatagcattttattttaggccaatgctctcagtctgggtgtttgatagggcttgagattttatcttgatgcacattgtattttttaacaattttgaaattaattggaaacttttaaaatcagttgggttcttatacaaatcaggatgttgatgttcttgtgaaaaaattgtaagagaagccaatacttgtgggcactctggagtgaggaccttgccttaaagctgagaggcagctgtctgcatatggtacccaccacttccaatatctctaacctggatactttgatgtgaaccgtctggcccctgtaggactggagtttgcaatctattgtgagtttatttgaggtggactttctctcatattttgaggatggtgagatggggtagagaggtgagccagttaattcaggttgataatgctactggtatgaaaagaacacagactgtcttctttttccttaagggctctgtcctccactttgcacctcacttactgtctagatttataggcactctggcatcaggacgtacacaggattaaaagcccaaaactcaaaatgctccgagtgctggtctcttggcaattctgctagacaaatcaagaagtaacaaatttctcccaagaaggctgtttcttttacatttggcagttaagttttgcaaacccaagaggggctggttgtaagagagttctggtaagtggccaaatttgggagtatttgtcttacgactgaggttcacacatgggtacggattatgttcactggggcagcaggcctgtctgcagagcgaaggtagtcagaaggttgatcgatgatagggtcattggggcagggaggacctgtggaatcctgcccagagtcaatggccacactttgggctggtaacctccacatagggcagacccactatggccctgggctgctcttagctacactgttctgatttttgacgtagctgcctaatttttaaaaaatcattcaagtttcatattacattatgaagtttttaatttataaagacattgttaaggatgcttcattggggttccctgtgtatttttctatcgccaactttatgttttaaatacatatattacagaaagtctcagctgagggcaactgaaaattttccttcagtctttaaaattgacttccgtctttaaaattctagagaatgggaggcttcaagaaccaatatccttgttcttagaaatctttctcctccaacatggttgaaggacagttctcaaacattggggaacattagaatcacctggactgtttgttaaatatgcagataccctgctcttcacccagaggatctgattcagtagatctgaggaggggtctggaaacagtcatgtttaacagtcgggctcaggtaattctgatagctcatgggaaacctcactttaagaagtattgtcagtgggcatggtggctcacacctctaatcccagcactttgggaggccgagacaggtggatcacttgaggttaggagttcaagaccagcctggccaacatggtaaaaccccatctctactaaaaatacaaaaagtagccgggtgtggtggcatgtgcctgtaatcccagctactcgggaggctgagacattagaattgcttgaactcgggaggcggaggttacagtgagccaagattgtgccactgcactccaccctgggtgacagagcaagactgtctcaaaaaaaaaaaaaaaaaaaaaaagaagtattgtcattagggttgctagataaaaaataagatgaacagttaaatttgaatttcagacaaacaaaaattatgttttagtgtaagtatctcccaagcaatatttgaggcatacttatactaaaacctttttcattatttatcagaaattcaaatgtgattggcagtcctacattcgtatttgctatagctggcaactctaattgtaatagaacataaatagcttgacttctctatgcctaggtcctgaacattaggtaatagttctttaacaccagtgaaagcataaccaggacaataccaatactagccagctggcccaaattatttgtatagattaaagaaaagagatttggtatttaggacacctatgatagagcagacagggtgaaatgtgcttcatatgatttgatttttttcaacagacaggaagtgtgagggtcagaaggactaaatcgtgtgtccagtatcacaaagcttgcacatggtaacgccagggtttagatgagttctgtctgcctctatgacccgtaggcttcccattccactgcataattcagcatggttctaacatttggcagaagccttgatcattttcttcttgagcgggaactcagagtgctgggccattcatttctcaggcatttctttgtcctccacagtgcctggaggtagtgctggctgactgcggatactctttaagtatctgctcaatgaatctattgactctgtgccatttcataacttcatgctttagaagatatttcagcagtggttttcatttagataagtccccttcattggaatgtccttaacatggctgacagttcttcgagagaccttccaattgagggaatgtagattggaaatcatctctgctccaggaatgtcatcagctatagttcccagattctgtcacggctgttttgttttcattgtcctttgtttttggttgtttttgtttatttataacttaaaaattgctgtttgttttggttagacttacaactctgacacatagaaactatcctctacatatatgtatatttagatcatgtttttggtattgtgcactgagtatcagctgtatgcaaaaggcacatggggaggattctaatgcctctttctcacctagatgattacaagtcagagctgagggagcagctgcccctgattgctggctcggcagcggccggggtcgtgttcgttgtgtccttggtggccatctctatcgtctgtagcaggtaggtcctccactctcacttgctctccttggacccaggaagcccctctccatgtgccgtttcccaggctgcgtggatcagatagggtgtgaccattcacgaccacaatcatcactccatctcaatccaagagcagcctagaattctttagatatttatttagctgggaaaaaattcatatgagagctgggcaaggctatgagtaaacagcatccatcctcaaacctcattttaacgaagacttttagccccctcttacacacaatggcttttcagagtgacagttgcaaaattgcatttgactcactggagcatccagcctgtgcataacccatcctccagttaagagagctcaggctctcagcagccagcaagagggaggcaggctggcaggagagaagatgaggaggaaagggaaactctgagttctgcagaaaagctggccccgaaagccttgtgattttttaatactgctgctactgccttcagtggttagcccagattctgtcacgcaaagccctgtagttggctccctcccaagcagttctgcaatgtagcttaagtgctgatggacatcctcttcacctctgcccccatcagcactgccctctgaatggggtcccacagtcccgccaggcttctgcaagaccttggctggaaagcagaaccatctgcccacaggagtgagtggtggtcaacaagagctctaactgcagcaggagggctgaagtgagagttgcccagtccctaatcctgggagatgccccgggtgagcccctatctggcctggggcctagatggaggtacctggaacagactggtgggtgtgccctgtggctgagagagcccctctttttatccacaggaaacgggcttatagcaaagaggctgtgtacagcgataagctccagcattacagcacaggccgaggtaagtagaaagcagagacccggtgtctgacccccacaggccactgagtcaagtgggctagtgctcagagctctctttatagccagactggctggtcccagtggcaagttctctctcagcccccagtgccttggccacctttctgcaggtccccaggggcaacaggctaccctcccatctgccgtctacctgtcatgggtactcattggatgcctggtgggtagattattgtctgcactgataagcccatataggacacaaaatgcagggaaaagattgggtttagcaagtcaatgaatcctcaaatcagactcagtgggaaaagatggagttctctattaacatcttctgccttatcttatccaattgagcagctggggaatttgttaaccaaattcacagataagccatagaacatgaaggtagggaattaaaaagatagcagagcccaagaggccaaagtgctgggatatctcccaagtgttttcctttaagcagtacctttaaaagtttttctcactcattatcctctctcttttataaacctatatttataatatttttataactaaaatttcttttcaccaaggtgcaacataaagttccctgtcacactcattttctcatctgtataatgacaacattgcaggatctgagaaaggtctctctaggtcatttgggccaccttcctgcctccagaaagcagaattctcagatccttacagcagacacattctgtttctaaataattccttttgaattcgacagatgccctcagaaatctgtcccagcactgtgtgctatgctctgtcaaggcttcttctgtgagcctcatctcacctcaacccccttgttgcaaagtaaggctggtgcttcctgttttctcagcaattagcatggaaaacagacctcccaggtacctacacaccaaacctgtctccacaggggggttcttctgggggtgaacatggactcccaggccaaagttctcatggaccagactgcttcttctctaaggttacccaaggcgggaaagtgatgacaggatgttcacagcagcagctgcaccatgaaggagcttgtgttctaatgcagccaatgccgactcgggctgtacaaagggcacttcatagatgtggcttccaatctaagatcaagaccctgccaagggtttgcagaggcccaagcccctggcagctgggctgctgcccagggcacttattgctggagggagttgtgggttctgcactggctcgagcactgctgctttcccacggtgccccaggggagcccctaccatcagcagcccaagtgtgggggccctctaggccacaggcacagctcctgctatattcagagtcctgcttattcctctttctttctctccctgggccaccctgttactccattgtcactgatttcagagggatcaaccctgctgtgttctctttcctttcctatggccggactgtgtgccttgctgcataatctacaggatgcttctatttatgttggcctgtgcattagcccttccaggcagggccttaccttccccaactggaaaacagggactttgcttgtacctgtgattctcaagtgatggtgcactcaccagggtgcctccgtatttcctcaagggcgaccttcgtctccctgcttccctgcctctgcctcaggatcctgacattgcctccctgactcttgctcagggctggctctttttcatcatgagccactgtaaggtccatttcagatctggcatcctgtgaatgctgtggatgaaacatttagaggtggtcatgtcagtctgaaagtggagccaggaccataaggataaaaaattaggttcaaaaggaggaatctcacttcgaagtcaagagatatccaaagatgccttaggatgacttaggtgagagctccctttccaaaagcgtgcaagccaagccttggcttcactccttggctggggtatagaggttctccaaacattgggtggggtgaaactttgtgccctttcggctactgcaacctgagatctggctgttctcctgctctcgaggagtagctatgccaggccatcacatggtgcccatgtgcacaaaagcatgcttccaaaatgctcacagctaccttttgggggactctgttacctctcaggccaacagaggaagattttactggttcctgagatccatagaaaaaccaatcctcagtctgcagtaatagtggccttgctggaacaagggaggacagctgaaagaacattgttggccagctacatagtcgccattcctgggactcaggatggatgcagggttttttgtgggtctgggttcactcccttggcttccttggaagtctgtcctctttttaattcggtttgccttttataaatcttgtcatttccctctattcataactattctcttttgatccaaccttgggcacctggctcctctttgcacccaagttctctaaactcagtctcatgcattgaattgcatttgtgcgtttactcctgtgaatatccatttccctgactaaagctattactgttggagaatcatggtcaaaggaatgtagagctggcggatggctcagcacacatacaacagaaggggaaactgaaggctctgatggagggagggcctggccaaagagggggtaggggtagaagtaaggggttagggaactccctacattgggagttttattctggcagctctcttaaactcattgagtcttcacaaccactctaagagaaaggaactaatctaggagggttaagtgacttatctagggcacatgactaagtagcagaggcagactacacaccctctaagccggctgcagagcccatgctctttccacagcctgattatgaggagcagctccaggactaatcccagctgtctaagttggtgttttgtggctccccactctgaatcccactgcaggaggcagaaagattgataatgtctgatccgaatgtgtgcacataactatatctggaccatccacaggcatgaacttctgggggttgcagacagcaattggagctctgagatcttcctgaccagggagtaacagaaaaccagcagctccccagcttgttcattaatgcctgagagagcccctgcctttcttgcctgcaggcaaggcacaggacactacagagaggctggcagcccctcccctcccagaccttcctttcaaactgatgcaaaggctgaagaagaaatgacagaaatgtttgcaaacagaataccttctctagctagttgagacgtggcagatctagtaaatctgataacataatgtggcttctagggcactggtttaatgttcctcctcagaacctggagcacagtgaataggaatatagagaatttggatttgggtggaaagagactagctggaaagcaggttggaagagaagatgtgctgggtgtggtgccagatgctcttcatctgagcctatcatgcatgttcaagggtgggagggtggggatgtggctttccgagtcctggaagaggcagagaaacagtttgttctcatggtttttgtgggcccgttctcagtaggtgctggctgactaacagttgcctggatgagatgatttaggtggtccaggtggccacctcgatgatctaggtgggcaagtataagtttgagaatctatcttgaaaaaagttccagttgattctacatttgggaaacgtagaatctaaaaggtgtttacaaagattaggttactacctactttgtagaggttgacacctccctgatttctgagttggctggaatgtgtaggggtagggagagtggaagataagagcttgttaaggggtttagggtcaagggctttcagaaagtggccctgacagactcacatccgtgtgcaggcaactgcagataacattacagcactactgttggtgaactttgggaaaagcacaaacaaatggggtatgtgcccaaagactttagattggcaaacaccctagttttcacatagggtaagagggcagagcacagagattacagaacaggagtctgaacttgatccctgccaaacacttggagagatgattaagcagatgagttctgggcattcacatttgaattcagtgatcactgggaacccccaaagtttcattaagaaaaaaaaatatgaggacctcgtctaatttaccagggttatacctttagtaaattcaagaggaattgcagatggagtgaatttttattttgaaaaaaatattttatggtctcctaagggaaagcatttttaagtggatactgagcttgtcttcctaccaaaagaaagtaggttagtgactctgtcagccaggaaggaagtccctggtgttattttagtccttgtcctattcaatctcttgtttgtttgattgttttttaaattcatgactcaggtgcaagcatagggaagcttatcgagtgtgtaggtaacatttggagagcataactaacaccacagaagatgaatcaaaattcagaactatccaacagctttgaatgctaatttgaaatctgcaagacaaaatgttagcaggataaatctggaatctcatgtttaggttaaaacaaaaataaagcagtgcaaataggagacctaacttgctgtttatttgtgtgaaaaaaatgagttagttgaccacattcttagtatcagtgatacatagctgacaaaaatccaagcaatgttattgatgcagtataatactgctaataaccaccagtattgcacacttactctgttaaacactttacataaattaactagtttcatccccctaacagccccatgaggtacattttgcatatgaagaaacaaagcctcagagagaacaagtaacctgttcagagtcttggaattagtgatttgcaaaacaaggtttaaaactcagatctgtctgactctgtggtctcgataagggttcagatcagaaaaggtgatatataaacagtgtcttgataagggttcagatcagaaaaggtgatatataaacagtgtcttctgtgtggtaagaacacatctagagtgatgttagttctgggatcccatttcgagaaggacattgtctgcaaagtagctgtccagaagagagcagcttgcttgtggagcagtggcaagttctgatctgctaccaaagagacttggaaatgccagtgttcagtgctgcagacacccaggcaggaacctggaagtcatcatccagcataatgccattatggcaaaagaaagatgttgttggcttcatgagattaaatggcaccatcaagtgcaatatcaaagtaggccagatttattcattgtaagtgcactgcttcctcactagagctgtccagcaaagagacagtctgccttgcagggaggtgtgagttctctgttcctattcaagcagagactagatagctgtcagtaaaggatgctagagagatttctgctttagacaggatattggacaaaattacacccagaagcatgtctagttccaagattccacacccagtttctggattctgggtggtgtctgtatttcagaactgcaagggacacagcatccagcccagaagaaatcacctcaggaaccaaagtgcaggtcaggtgtgtccctggaggagggagactggcaatttcggctccctcttctggagggtaaccagagcattagtcaatgaggagagtaaacgaagtcttattgggagaggaggaaagtctccttggtacaaaaggtggctgagtttacagcgggggcttattaaatgtcaaataaattttatgagctagattcacccatgtgtctgctgctggctgtaagccagagactcaagaaaccgtgttaactcttttggtcctgagatcatcagctcctgccctttgcttcccaacagctcctcagtgatccagaatcattgggccttgctgggaaggaccagcctgtccccgtcattgatacccacaaagcagagagatgttaagctttttttctgaaatagtttctttttttttttttttttgagacggagtctcgctctgtcgcccaggctggagtgcagtggcgggatctcagctcactgcaagctccgcctcccgggttcacgccattctcctgcctcagcctcccaagtagctgggactacaggcgcgcgccactacgcccggctaattttttgtatttttagtagagacggggtttcaccgttttagccgggatggtctcgatctcctgacctcgtgatccgcccgcctcggcctcccaaagtgctgggattacaggcgtgagccaccgcgcccggcctgaaatagtttctttaagaggaagcagctatggtctactttccttctttgggagacagatgttcagtaataactggtttttggggcagatcccaaaaatgtggtaaaacccccaaacacaaagtgtcaggaaggtcctcctcccacccactgcttttccagcctgcattgtcctccctgaggttcctgtcctgggttcttcctcaagcactggctgggcacccatgacccctgctctcatggaaaaagacaaccacccagtgtcctggtcttagccctcagaggtcggtggggcagactatttctagtgctcgtcagccttcgctagttggtttactccaagaaactgcccagtcttcagccttcctgctaccacccgtgtgcctcccaaacccacaactccagctccactcttctgactctgtcttcagtccgagttttctgaccagcttctaagcacctgcatatttcatttgtacatccaacgtctaaaaccacatgtgccagcccctcttacaataggatttctttccaaaagcccttcacctggttaatagtgccatgtgattctagaggtcttggcattgacttggattcatcttgtccctccctaattccccacatctgactgctcatcaactgcaaccacatcttcctttgaaatttgtcttgtctcttctgctgttcttgttgcagtactccggttgaaaactgttatcttacacctgaatttgtattacataacaacctcatagctatttttccaacctccagccccttccccacagcactgcatgcaaatgctgcagcttgccagcaagatgagccccccgatgccccactttcagtacatctgtcccctgctgatggaaccattgtcagctctgtgtgtctcatgacatcaatcctaatgcctctgtttggtaaccaaggccttcccatgcttctgactatcactgattccctccacattcaagctggtatcactctccccactcatgcactgccaggcctcagttagctgtggctcacgacactccaggctcctctttttccagtgcaatacgatgtgcacttgtcctttcaggctcaagctgagttctgatgttttcaggattctgaccctgaagactggcacccatagcctctgccttttctggtctctgcagcacttgcaacccatttccagatgtgggctcctgatccaagactatccagcactgttctccagttatttcatatcttaattgcctaaagaaacttgtgaactttgttttgccgatagtttccacagttcttagcacagtgctggtttggagtcctgattagtgttgaggaaaagggttgatcaacatactgaggcagaagattggatgaagtccctgtatgtaaagatctccaaacacataaaaccccttgtgcttaaatatctggaccaattttaggggagtcacaaaaatgacatcgtctgccttgaatccagaatgaagaacaaaaagccacactttctcattggtctgttcaaacctgctgggacacaaaaatattaatgactaaatacagcctaatgcactacctctgaaaccatactgtggaattctaggcatcctccaccagctgggaagtgccaggtttgtactggcacccctggagccatgtgggtattcgtgatctccactaagatgtccacggtattgattttgtacttcctgaatgcacaggaggcctggatagaagcattcactcctctccctccagctttcaatccccaaatatcacctactgtttaaaatgaccctttccagccctcttctgctcttccctgagaccctggctcttataaagggtctccccgacttttcagatacactctacatgtctacaacatccccagagacatgtcccagccttttcacttttgagagcatcctgatctactgatggaaggtctctgacaatgctcagaagtttcttctgcttcaagaactactccattccatgcaacaaggttctggacagtggctaaatcatttctccccaaacctaatatatttaaaggcttggttcatgtttaagattttataattctcctgagactatggtcctttaaggctgtagttaatctcaactatagcataagtgaactttgaggtcaaagaacacacatgactgcaaagtagatctttaatcaaaattaataaattaatagaacataaaattaaagatttttctctcttttgaggtactaataaacagcagtttaaatccatacataacatttttgtgccaaaggtatgtaacctatgatgacaataattggaaactataaaatataaatatgttaacaatatttatattaggaataatgataatataaagcattgtacggattactataaaatgctttacattataggtatatattacatctgatattattattactgccactaataatatttccccaacactcacaaatctgagaacgttttctgagccctgtctccaaatgtttggctgtgcctgactctgtagctgacttgaattccttgttcactgtctgatgattcattgcactaaacaccattttcctgataattaaaaactgctcactggcaagtgggagcaggaacatgctgatgtaggatttatgcagaaacacaaaatgagccaaaagacaaatgacctgttctgcctagctaaaggcttttttttcccctcatcatcttctaagatttggaaaggctagctatactgcaggagggaggtctaggaagatgcgtcattctgagatgaggcggatacaggggagcccttacgtgcttggttgagagtgctcaaccaagtcactctcctgatttagaacacagactgccgccccacacagaggagcaacaccaaggccaccttcccagcccaccctatcagaccttaggggaaagtcattgagtttgagccatttgttagaccaatgattcactttttcagtttcccttcttcaatgtgacaatgctttcctcaatttcaggggaaacgagtactgagtctaattgttgcatagatgcagccattaagatgttctaaattgacgttgcatcactactccaggcagccttcttggcttctggggaaaggtctcagtgacaccaatgcccatggccccagaacagcagctgtgacatcacatatatgtgtgcacacacacacacatacttcttaattctacaagctagcaaagcagcacacctctcttcgtcagtaaagtgcacccatcttcacagtgcagactttgttccgtttatgtgcacttatttgcgcattactggcccaaaagaatcctggcaccattaagagataagccctttcccttctgggaatagctccttccttgaactgattggggccaatatctgtaaaactcattaactcagaatcctttcccattcatccttatgtatgtctttacttgcaaaccattcattaccgcatattctagattgtttaattaatttccatggaagagttcctgtaggacagcttagcatacatcgttcaaaagcctttgatctaaaataacaaggtagttattttcgaagtaactaatataaccctaagcggcttacaacccccactgcccaccctccgcttgcttcctcttcctacctccccaaacacttcctagaacaatttactgatgatataacaagtctatcagtcagtgagtcatcactgtacatcaggcactgtgctaggtatgtcgtcagcaatatgttctttaatctcacagccactttgggagggagatgttaccgccctcataggcagaggagaaaaccatgctaagaggtgtgtgccgacttgtcacattacacggggctagtaaaaggtttgggggccctgacctcacctgtgggtcccagcatctgggctgtttacgtcctctcaccacagcacagaatttgggagaagtcatagcttgttaacgctgacctgctgtcccttttgcattctgagtgcatctgttgctgccagtcgcacatcagctggcttccacctgtggcatcagtgtttctttgcctgactgctttccctggccctggagcctcccctgcccacccgtacaacaggccaagcagcccctgaccaattgtgtggaaatatcacagctcccttgaccccagagtgggacaactctgaagcatgtgctaacctagacattgcttagatgtgaatctcaggggaattaggcctgctcaatgacccacagtggtcagtggcttgagaatgcgcctcttataggctgccttcctttccctatcttacttcccttctcatctcaggtacttcttgggatcaccacccagataagccacttactttcaaaaatcttgcctctagggctgcttctgggggaacccaaggtaagacagggtggcctggagatgctgacctgggttctctatatgcttccaatctggtttgactgttcttactcttcacttgttctttataacaagtcaaaaaggactggcacccccatctccatttttctctttgtccactgttattaaagcagaagtctcttcctacacacgcacatccctgatatccatcctggggactagaatattctacataaaggtgaggatctctcaatttcctttgtccaaatttcagtctatatattctcaagtcagtgtcctcccaaagctttcaaggagacttctagaatggtgtgaacaaccctaaaacaagtgactgggaataactcatctttcagaaaaaaactgttctgggcagggcacctggccctccttatcttaaaaaataatcccctcaggccaggcgtggtgactcacacctgtaatcccagcactttgggaggccggggagggggggtggatcatgaggtcgggagttcaagaccagcctggccaagatggtggaaccccatttgtactggaaatacaaaaattagctaggcgtggtggtgcatgcctataatcccagctactcaggaggctgcggcagaagaatcgcttgaacccaggaggtgaaggttgcagtgagccgagatcacaccacaccactgcactccagcctgggcaacagagcaagactgtctcaaaaaaaaaaaaaaaaaaaaattctcctcaatggtttgctgtatcttctgtcttcctttggattacactctagtctaatttccagtccttgcctgaattggtgaccaagcaacaccagtttaggagagctatagagccatcagaagttttttggatggaaaatgtcaaaactagagctgggggtcaccagggaacaagctgtagtggcaaggggtggggaacatgaagaggggggaggtgctaaaatggagctcatgaaacctgaggcctaacctcagccttgggccctagtcactgcacctggagcagtgtggcttttttaggcctgccttcccctgctgacctgactgtttcttgaatgagacagcagtacctggcagagaaagcccctactcttcccaaggctgtgatatcagaccttgtcatttgaccttcgaagccccagcctttccaccacccaccaccatgtaaacaattcctgtactttgcttaatgacgtatcaaacatgttgaaaaattacattgtgaatgaatgcattggtttcttgggttccatttcctttttttttgttccctctcctctactttttgaatgtattttttctgcagtgacaattctctactttgtccccatgcacacctatttatcttgccaccgtatatatcagtgacaaggtctatattcctttatgtatttctcattcaccattttatttgtttttcatacttcagtgtgtccgaaggcatgaagagtcaatcaccatttttctttcataccacctcattttttctatgtagactttgctcttttctctattagtattttctaagcttttctcttcacattttctcttctggtgtaccgtcttggcacttccatctccagatttttctaacagcaatttctctctttgtaaaaaaatccatcctcttccctcttacagccctgcaccacagccgtcagttataaccttaacagtggcctccactcaggaaagttgtcaagttgataaatattgatatctaccctaccattttaccaccacttttctgctaatgcatttggttggcatcagtcagcttccttgccttctgtgagcacccggtgtgggaactggtcccgatctgtcacttataagtaatctgttccacatttcaccaagagctcaaaaaaagaagaaaatatggaggagaagtagaggacagagaatcagtctagaatgacccagaaggaagggagatgaggaggcccagcaagaggaggagaggcagagaaaagttgcagcctggtgtgtaggagagctcctcccaggaatgcccttagtgctggggacatcagcagtgctgaatgacaaccatgtcctctttgggatgttaaccctgcttatctcctccaacaaggctccccagggatgaagatctacattgaccccttcacttacgaggatcccaacgaagctgtccgggagtttgccaaggagattgatgtatcttttgtgaaaattgaagaggtcatcggagcaggtatggctcttccctgtcttgtttctgttctcctggtgtccaaacatcttctttccaccaccctagatggtctctttcagtatgaaaagccccattaggaggagagcttctatcttctttctcctcagaagatgagtctgaactatctacatgtgtatctaggacagagagaaaacatcacttgggatctttggggaccttgaccatggtggccaagcttgtctgttgttgcagaaaagtcagctgcagttttatagattcagaaataactctggaaatggaccaccaaatgcagataaggtacttagttgagaaggctttgaaagaaatctacatttgtagtattccacttactaacaatgatatctcaatgggttaaagtcaagatatcttgccatactgtaagttctccatttcctatgtacatgaatttgaagacagaccatgatgaatagaagagagaccactgtttccagaagaaagtcaacctatcaccttcttttttttgtttgttttctttgtttgtttgttttacaaaaaatctatggtacagctggtaacaacacaagacgaatttcactctcaagaaatgtgtgtgccctcatccatcttcctgcactggaatagaaacccagcccagtgtaaaactcactgcctgagatgctctcaggaaatcatacctaagactgatctagaattttcatcttcctttaatgggttagtagctgagtcaatttggcaatggacctagacttattaatgtaaatgagataaaacatctcaaaaatcactaaaagaaatctcattcctgcgtcttatgaacctttttaaaagatgtgttaaatttgttttattttcttctgcaacattcttcgtcttttcttcctcttcaattcttgttagccattgtccaagctctcttcactaatatgctgtcatcttttttaggttcctagatctagaagtgctttattcatatcattattgggaaagccatggaattgcctctctcaataatattttaactcaataaaatatgtttagtcaaagtcttacagctacttcatatattatctttagggggaatgtcaccatctttctgttcactgctctcttaatgcactcaggggtcaaaaagccatctgtgaaattggaagtcacatttgagagtctgtcccattaggccgccatcttcctgctctggtttccctcttgaatagcttcgtcctcacacttctttcagcataagtgtggtgggtgctgggaaatgacacaccacctgctcccgccaacccctcaggagtttcagctgggtcaccagactcagatccacttgagtttatgcatatttcccattgacttttacattaagaatgttgctgaaccacgactttcacttctgtgcagataattttctcttcccctttagatgctgacatatttaaggatcatgccttggaaggctgggtaccagataaattggataactcttaagggctcagatttctccagtaaacatcaaagagtgttggggaggcgggctttcagtcctgtactctgtttgctcgtgttattaattgttgttatggcttgtggtaatggtgctagtgactttaatgttgttatttatgtcatgtgcttagagcgatgtgttctggactgtatttcatcccagagagcacacatcagccccacccccacctgcttttgtcagaggaggagtaaagagctttctcactttatgaccctactggatagttacaatttggggtgagttcaccagctgctggatgcctgtaaaaggacaattgatagttctgccccatccttcacctccatttgtgtgtagcatttgccagtgctgccatgttgtgcattctgctcagagaaggttcagtcttctccatgactcatgtgatattggggagaaatgatgcatttagtagtttctatgatgcccagtagcatgacataaagacctctgcccagttactctgcccagttaccattctgtagcagagacccatctccttgtaattcagaatatcccagagcgaatccttgtggatgttaacttactatgcataacttcatgcaattttaacagaagacactcctgcagggaaccaatttttctccaggtccttttctcctctaccatcactctcatttccctcataccctgccccactgaggctgactcttcagtgctaaaagagctggtgtgaaggtcaaattgttttaaaagtaaggaatttgttaaggtaagatttatgccatgtaactggcaatgtttctcttagccacttgaaatacttgaagcagggggaaaacttgggttgcaacatggcaacaaaacatgaaaagaagagtcggaagtcctttattcttcctttatttttttctctctccctccctacttcctctctccctcctcttcttccctcaggcttttactgaatacttcttatatgctggatgtggagttccagaggcgaataaacagactcagaggtctgacagatttagtgggaaaaactcaggccagtaacagttaattattccacaccatccacacaggcatgtattatgcaaagagcagcatccagcttgctgttcttggaggggctgagcatatcaggaaggctctgcaaagaatgacctttggcctgagccttcaaggataaacactagtagaaaaagtaagtttttatgaggcgtatgagagaatgagatagtgacagaagaggaaaactaaatgatttaagaaggataatgaacatgaccttccagcagtggacatgctatgctggacagcctgcagtagcttgcaagagccaattatgcacatctgtttctagccccatgtttagtgacaccatgttggtagcttgacatcagccatagtagaagtatttacatcatgggaatgggcaaatgctacaaatcctgagcctgccctctgtttgttctttcgtttcttttctcttttcttttcttttgctttcttttcttttcttttcttttcttttcttttcttttcttttctttctttctttctttctttctttctttctttctttctttctttctttctctttctctctctctcttcctttctttcttcttgacatcaatcatagtgggagtatttacactatgggaactggaaaatgctacaaatcatgagccccttctttccttcctcccttccttcctccctccctcccttcctccctccctcccttcctccctccctccctttcttccttccttccttccttccttccttccttccttccttccttcctggagagctggtagttgaacacttataagcacacccccaccctccagactatgtaaagttatttcaaagaggttgcagaagaactaccctgcaccagctaaatatagagccagaggagaaggctatgtttgttgcaggagggattaagtttacagttcagaaagatctttattcattaaacattgtttctgtgcatgtgactgggggtgatgctggaaaaatatactcaatgcctaacaagtcctgccatgcaggggttattgtctaaagcacacacattcaatgccactcagtgagaggaaggcagtgattgagagctcagatgagggcccggagaatgtgtagccctggagatgggagagaaggcttgatggcaggagaggactcagggaagagggaacaaagtggcctctgaggttgtgaaggctttggatggactgacattgtgtgtcacatcctgagaacaaggggaaagaaagttgctggagagggattgcctgtgggtaagtactgaacactaaatctggagaatcaggccaagatctagagatccagaggctgctatatgaattttatcccatagaaaataggtttcatagcagggtgggtgaaaggaccaaggttctagcaagctgaatcctataaatgctgtgcttggattggactggaagagggggatgggaaacaatcgctaaaaccttggaggtgggaagacaagttatgaggttttgtttagatgttacagagaggctttgagatggttgatgctaggatcaaggctgcatttaagtgactaagcttatccaaactggggtatacccaaatgaatgtgatgaatggagtgactagtgagcttggtgcctggaggtgatggggagtcatagcatggaggctgtgatcagaaatgaggggcatcaggttaagggagagtaaggctgcctggcacccaggttgtggggagtggcagttgtgcatgtgagtgaagacccacggagggaaagttcagaaattgtgaggctgaaaagttgcatcagctgccaaagtttctcctaaagttgttgcaaatgttgatcaaagaaataaaaatataataattgtgagccaggtgtgatgccacccaagaagacaataataaatcattaattattaagtaattatttgtttaatgttcgtctttcctcacaaggctcaaagttctatgggagcaagggaatgtatgtgttttgttggtctggtacctggcctagtgcatggcacttaaatgctcaattaaatatttgttgtatatggcgaatgaaagtaggtccttggagggagaacatggcagttaaaaatctggagaactaggtagtgtttgggagaatgaagagagactggacaggtggcatgagatcatgagtcatttgatgctctgaaagtggcccagtagagtgaaggaaagctgactcttcctcttctcactgtagataatgagagtaattgaagtatcttcacagagggcagcaggttaccttggtatcttcagagagtaccagtttattgttaccatgagtctgactaataggcatcatgtcataggtcaactccaatgcattggttaattctggtcagtttgatcagtagacttgcccagaacatgaatcagggctctacagcttgaatggcactcctgggtgcagtgtgaaacctgtataactgtatgcaacagcctaagcatgactgtcagtgtatgactacataggtaaaggtgtcactagaagttgttggcagaagaagacatgccatttgtattttcatgaataaatatgtctcctctgactctagcagctagtgattcaacatttccaggaatggatgatcatctggaagaaggaagcttgcagtgaaagggctgtgtgagaatagttgggatgagggaatgtgtgatatgtgtggatggggatggagtcatctgtgaggccaacaaaggcccgggtttccttggggatgatttggcagaaaggtcacttgcaagtttgacagtcctggggtcattcagagtgcagatggacagcatgagggtagctccacattgaatagaagttacggcaagaagcatttctaggagaagaaatcatagacatgtctccaggaacatagtcaaagtagctagcatctcttgaacactcaccgtgtgtctgacaatactctacatctttcacaagcatcgtcttatttaagtctcttattgctctgtgagttagagcatatatatctgtatgcatgtatattttcttgtaactggtaaggaaatcaacattcagaggatagcttgccgaaggctgtgctgccagttaagtttatgatagagctagaatttaaacccagctagagctgatccagatctggagaatgtaaccctcacatgaatgtaaccctagggctgttgcgtatagttacagagtggccagctgccactcttgttgctatggaaaagagcagctcagtatacagaggcattgcttccgatggcattttggaatacccattgcttctctctagcagttttgaatactcaagcctcgttgttgggaattatgataccatcctagaattcattattactctattgtgatgctacaaagactgtcccacatgccctggagagagcatggtcctcatagaataccctggtcctgtcttctggttttcttcttctaagtgtgatcagttatcagcgttaagaaggacaacaaggactgagatatttagcatctttaattataagtgcttgcttatgaaaataagctaattacatataaaatgtagatgtatgtatgtgtgtgaagatatatacactcatatgtgatatataggtatgcagttgtttaacaactataaaaagctacaagaaaagagaaaaccattttccctcactctctggatattaggtattgtgaataccgtggctgtcaagcaggttccatctcatgtgccaactcagtggcctggtaatgagtatctgaggaactctgatgaaagggtgaagatggttgtgatcaactaataatgtctatcctctgtgcagggtcaggaagtggtggagtgtgtaccatggttctgctctccctggtttagccgtaactcatttatcttgcacaagctagtgtgttaaaacttgcttgaaatcatgctttaaaacctagtttaaatgtattctttaaaaattccatttctggtgtaagcttgaattagtaactagaagctctgctttcctttttttccccccaaggcagtttttgacttcaaaatgctgcttttttaaaaaaagtgcaattgtgtgtagatttgagctgtgcataaccagaagctactgcttgaaatacctgctggcaggtgaatgtttcgttttcaaaaattgagaattcttttcttctgattttacatacaatagttgaggcatttaatgctgctgaagcactttttctctcttcctcattttgtcaaggaaggtaggaaagaggaattggcaaggagctgaaacttgcagggaataatttcagcagctatctgggatgaaatgcataggaattggttaaattaccctcagctgacagccttgagggccaggttctcaaatagatgaagcaggcattagaatcacctggaggctgctaaaacccaggtcacaggccccacctactgagcttctgatgctgtgggtctaggtgggttttgggaaagtgcattttctaacaagttcctaggtgatactgatgctactggtcaagaaccacagttcgagaaccactgctgagcacattggccactagactgacctacacctggatctgggtcctaaccaaatagatgtctggctataggagaggacccaatgtcagacacaaagatgtgtgccaatcaaagtccagtgggaccaaaattaggctggccacatttactgtcagtaaagaatctgtgtgaaaagaatcaaccacaaccactccccagcacagtcgtttcctttaagcgtctgtcttaaatataacgttaattcttgaattgctggaaatattttctaggtattatgaatttttattaaaaatgaaaacgttatggccatgatttggagctcaagtaaaacgaagctctttagagttcagatgatggcgaatcgaagtaccacagacatcaagtcctggccctaattacaggaaaattatcaaaatgcaaaaatagtttcttgtagatactatattaaactgaagtcaaagatcacaggcgacagcaatttcttagattgtaagtgacacagggtcttgatttcctgtttgttattaataatagcaatacgcccatcgactcctgcctctctataaggctgtaggttgtggtgtgctcaagggccagaaacccagactttagcatcctaggcttacctgaagacaccctccatgctcaggcacctggcagggaaacttcaccatgtcccctggcaaaaagctctgatgtgtcttagatcagtcaccataagtctcaaaaggctgcagaaacctacttttcctctcttttctcttccagtgagactcccctactctgcactccccctcccaactacctacttctgttttgtctttttaaaacaggcctggcatggtggctcatgcctgtaatctcagcactttgggattctgaggcaggcagatcacctgaggtcaggagttcgagaccagcctggccaacatggagaaaccctgtctctactaaaaataaaaaaattagataaaagtggtggcacaagcctgtaatcccagctacttgggaggctgaggcaggagaatctcttgaacgtgggaagtggaggtagcagtgaaccgagatcacatcactgtactacagcctgggcaacagagcgagactgtctaaaaaaataaataaataaaggccaggagtgatggttcacacctgtaatcccagcattttgggagcccaaggtgggcagatcacgaggtcaggagttcaagaccagcctggccaacataatgaaccactgtctctactaaaaatacaaaaattagccgggcgttgtggtgggcgccagtaatcccagctacttgggaggctgaggcaggagaattgcttgaacccgaaaggccgagattgcagtgagtcgagatcacgccactgcaatccagcctgggcgacatagcaagactctgtctcaaaaaaaaatagaataataaataaataaccacccacaagtgtttcgaacagtttgtagtttacaaagcactttctcctagacttctctcaacacactgttggtaaggcaagacaattggtcacttctttttattatataacaaggagaaagctaagttctggagaaatgaagggcccgccaacatccaatgtctcaggtgttgtttgcgtgtagacatggagcttcttcctccactcactaccaattttcctcccaactgtactcaggggcctacttaattacaggggcgaacataatctcctggtgaggattagatattaagtggcattctttgcagttggtgctttgaaaacctcctggcttggagaatatgaagacacttctttgccagacaggaaaggaattcttttacagaatttccattctttaagtcactgcagagcagatttctgagagcagtgacaccatgaccacgaaggtaaccaaccacaaagtccaccatgccctacccaaagaaggcatgtttatattttataatttttaaaaactgtatgatgagtttttagacttgaagaccagtcacaaagattaaaaattaaataacgtttcccaattaggaaagtagtttgattcatactgtcctatacatcttcattgatttcttccttccttcttttcttctttctctcctctcacatctataaagtccatactatgtgccaggacctgtgctgtatgaggcaggctatatgtgtgctttgctttcaaaagtattcagaagtacagagagaaatttcaggaatgccatggcttttggcagttcactaattcatttgaaaagagcttggatggtttaagcctatggttttcagcctgagcggcatgtcagtatcaccgggcagccaggcctggcttcatggacctgtgactggtgcattttcacagggccggatgttcagaaggacatgcacttggtttaatgctctgctgttacagtattgaaatgctcaatagtttttgaacaaggagtcctgcacttttactttgcaccgtgctctgcaaattatgtaaccaatcctttgggcagcttttaaatatgtcaatgtgcaggctgtatccaaaccaattcatcagaatctctgaagtgaggcccaggcctctggactctgtaagtctcttcaggtgattccattgggcagccaactttgagaaccactgaggtagaacagaagttctcaactggagtctttttgtgtgttgtgggggacatcaaattcacctggagcacttttccaaactccacacactgataggtagaaactgataaatacactgatttccaaatattctgatgccacccaactcccaggcaggaggcttatgtgaaagacatctgcctgttaaacagtatcacttcttttgttctcacatggatattgagttgctatgacagtcactatatatgacttgttgggacctgcacatttggggcatgatggtccctgaactataacttcatatctatgtagctttattccccatgtccctgccaactgaaacatagctatctagaggcagtatggcaggaaaagatgggtatggaccacagccctggctgtaactcccagctgtgtgattgggacatgttttccttgtgcctcagtttccttattatttaaatggccatagtaatacctacctcacaggagtgttgtgaagattgaataagtcacacaaagtgcctagcacagttcctggcacatagtaggtggttaataaatacacatttgtgtgctgtctcctccacaaagaaatattaacacacctttaccctcaactatcaactctggcttttttctaaaagaaaatagagcccattattatgacaacaaggaagaaatactaaccaatattcttccattagtatacttaccaaatatgtaatttgtgttcattcagctcatagttatatatatatagcatatatatgctacgtatctacatgcatacatatatgctacatatatacatgcatacatatatctagacatatatacatacatccacatatacacacacatatgtgacaggtctgtattgtctagtacttttctttaaattttactcattttaattactaaataagttaagctattgtagtgtttgtctatagaagatgatgctgcagtaaatatatttttaacatacaaattcaaatagtggtacttctatttctggataaagcagagataagaatcttcagcagtttgtaacccaagagtgagcaaggcaaaagccaaacatataataataaatatgatacaacaacttttactggcatgtctgctatgtgccaagcaccacagtggagtggatgtgcaagctacaaacaggaatgagacttggtctgacctccagcagttcaccaaaagagtatatgattcaatgtgaaaagcagtgttgcagccaggtgcagtggtgcacacctgtggtcccatctactcaggaggctgaggcaagatgatcgcttagcccaggagctcgagtatagcatgagcaacatagtgagaccctgtctcaaaaaacaaaacaaaaaaaaaggagtggaagggaggaaggaaggaagggagggagggacagagggagaaaaagggaggaaggatggaaggaaggaaaaagaacagcccccccaaaacacatagtgttgtaaatgatatttatctgagtattaggtccatgttgaaatcttcctaatggtgcttaaccagcctctactccagccccaggttctatcaagttctgttgactctggagaagttttgcataacagtcctttcacacagcttccttccaatcttttttgcagcaagaaaacaaaaggaactcccaaatgaatcacaggagcaatgttaacttgtctttctaatatggcaagtaatttatctgattgctcagtttgctccatcattttcttccagaagtggaaagtgagagagaaagttttctcagcagaaagccatgtttcttctgctgcacttacaagtagacactgaactgcttcacatgaaagaattggaagtaaccaagccaaattaaattataaaataacttttgaaagcatgttaaacaggattcaacagatttttttttttttttaggcagctatgaaataatgtcaccataattgtttctactcttggtgactttactgtgaaaatgtttcaacgctgtggcatgcatggaggtgtgcagctcatgcctgtttggagaaataacttgctattcagctgccaaaagtgcagttagctgacagcctccagctgcagcaccttcagggtcggccccggctttcctgcagaggcccagctcttcccagcagcccccagccaatgactgagcatggcagggatgtgagggctgggctgcttttgcaatgggaactctgctctggctctccctttgggttagctgggatttcatcaggtctgcatggtgatcttgggctgtctccgcccaatcctgcttcctctcacttttgtctttcacaagtgaacctcttcccttcctaactcctcagtgtctgttttctggggcacccaataaacacaaatgctctcccagcagtgtaggaacataaacagtatacatctcattcagagggccaaagtacctgaacatgtctcctatcccctgaatgttcttgcaccagtatctgctaaaaatgaatcatgatcctgccaaagtgaaactgaccatttcatttcaattattcagctggcacacaatggaaaaattaagtgtggggaaaaacaaactcacatatattctgaaattccactttagttacccaaactatttctaagtaccaaggtaaggaatgtactttagtaatccttttgtgtttgccatgaactggttacagccaaaacaatatagttacaatgagagaagactgttttaatttccgccactttaatcacaattccacttggggcaccattgttctccattagatgacttccctcttgagtccacagactgagaaggaagaggatattaatggcatttttgctgttgcaggggagtttggagaagtgtacaaggggcgtttgaaactgccaggcaagagggaaatctacgtggccatcaagaccctgaaggcagggtactcggagaagcagcgtcgggactttctgagtgaggcgagcatcatgggccagttcgaccatcctaacatcattcgcctggagggtgtggtcaccaagagtcggcctgtcatgatcatcacagagttcatggagaatggtgcattggattctttcctcagggtaagagcaactcaggggtttgatgatgcacttggatgcaggtgaatgatggctggggagaggggttccatgagcacaacctaccaatcaggaatcgcctgatccagtgtgaatgggcattggagatgttagcagagatttgttgctaaaagaagagaacaaaacagggcttgtgggatcctcaggaggaggatggcatggagtagggcgttgacaaatgcttattggatgaataaaatgaatagagagggacaaagaatggccattggcatctgcatgaatcacagagattgaagagacttttggctgctgcacagccctgtgtgattcatgcagacatccgcggccatctctgcctttcatcagcacagccaccctcccagactgctctctgcatttacaggttcagaagtaaaacaggttgccattttctgatgcctgggccacctgccctctgaggaggcacttctgagtagggaaggggaagactgcatcacaagcatccacgggtatttctgtgattggcgaagattcccaaccaacttgcagcagaagtggggagttgctgaaggcctttggctgggagacctgtaaaagatcattgtcagaatatgcccaaagtagagccaggcccacaatgaaaccattttcatttctgtagggtatcactgagcacctagaggaagggtgaatgagaatggccatgatgctgatatctggggagtggaagctgatagcttcagccaggaagcagaagctgagagcagagggtccagtgggcagcatcaaagaatgggcagagccttctgagcaaggacttcagagtgatacccagtagctggctacacacattaccaaagcaaccaaacaatagctgtggctacagattaaagggtcagtcattgaaacattgctgggatcactgctctggccaggccctattctggatgctgtgcctatagagataaaggaaaccttgctctaatgctacgtaacaaatcatccccaagacctcagtggcttagcacaacaacaatttattttgctcatgaatctgcaatttgggccaggtttgggagggacacctctgatccatgtggagtcagttgcagtagctcaagggctgaggcttagaattgtctgaagcctctttcattcatatattaggtggtcagtgccatctttctaggtggcctgcttggacttccttagagcaagctgggtctcaagaaaaagcatcccaagagaggaatgaggaatctgtattacttttgtgacccagcctaggaaggcacatagtgtcacttccaacgtagtgacaggcccagatacaaggggagaaaacaggccccacattttgatgaagggacatcaactcaatgtcttcttaaacatgatagatgggagatcttgttgtgttcatcttagacagtataacctgccatcaatgtagtccctactcctgctagtacccaaagcttctagtaatcatttgcctatcttatactttttttccccataagttaagtacagatgtagtaagtgaagaagttcttaaatcttcctggagaatctagggaaggcttcaaagaggaggaagaatttatctgagattagagaatgaggaatttgccagacaagcgagaagcaggtaggtaggctgatggaacagcgaaacagtgtatatgaaggccgaagtaaatgtggacctatttggtaatttatcagctgctgcatggtagctccagcactcagaaacagagcttaggggctgtagtgtggaagggtagctgggggacttgtctagaagcacactactgaagctacctttgtacaacaggaacatgctttttgcccagtctgggtcactaggaagtagtggcttttgtttttctgagggtgcaggggtggagaacaactgatgtagattactgagcccatgtactttccctaggacagcctccttgagggtatggggttatgctttgtatttggaaactccaatacctaacacagtgcacacctggtaaatgctagttgactaaaagattatttctcaaacaaaaatgctagggagtggcacgagagctctagtcatcctgtgtgtacattatctctcactgtccttgctgccacacctgtcatgtcagtgcaatcattgtctatgctttcctggggacattcatttattatcagagatctcatgaagacagttgaataaacaaagttgaatgaagttgagttgaataaacaaagttgaataaacttgaataaaaggcaatgtgagaaggaaaagcattttctggaaccactgtcaagacccttttgggagtcatttatttcctaccagtcacctgattgtacttcagagagagtcactgcttgatttggggactgtgatcacactcccccgctggagtgtgcaggggaacagggagattcattctcatgagcctgcggaaaatcaaaaccccacactgctgctcttcctagggcctgttttctttttatttatttatttatttatttatttaagttttagggtacatgtgcacattgtgcaggttagatacatatgtatacatgtgccatgctggtgcactgcacccactaactcgtcatctagcattaggtatatctcccaatgctatccctcccccatctccccaccccaccacagtccccagagtgtgatattccccttcctgtgtccatgtgatctcattgttcaattcccacctatgagtgagaatatgcggtgtttggttttttgttctcccgatagtttactgagaatgatgatttccaatttcatccatgtccctacaaaggacatgaactcatcattttttatggctgcatagtattccgtggtgtatatgtgccacattttcttaatccagtctatcattgttggacatttgggttggttccaagtctttgctattgtgaatagtgccacaataaacatacgtgtgcgtgtgtctttatagcagcatgatttatagtcctttgggtatatacccagtaatgggatggctgggtcaaatggtatttccagttctagatccctgaggaatcgccacactgacttccacaatggttgaactagtttacagtcccaccaacagtgtaaaagtgttcctatttctccacatcctctccagcacctgttgtttcctgactttttaatgattgccattctaactggtgtgagatggtatctcatagtggttttgatttgcatttctctgatggccagtgatgatgagcattttttcatgtgttttttggctgcataaatgtcttcttttgagaagtgtctgttcatgtccttcatccactttttgatggggttgtttgtttttttcttgtaaatttgtttgagttcattgtagattctggatattagccctttgtcagatgagtaggttgcgaaaattttctcccattttgtaggttgcctagggcctgttttcatttggggctcaggtcacggaggcatgttggacaccagcatttctcatgttgatgagctgagcttgcaggggaagaaaacctgggggcatgagaggagcacgggaaaacagaggagcaggcatggtaagaaaggagtggtgggagcaggcagtgccaggaggagagggggaaatgaagcgtttctgactcctcacactgcatggaggcaggtaatctataaatctaatttcagccttactaccgaaccctggagcatagcaacattaattgacatatctgctgcttgataaaatcgaaaaataggtcatcagttcagttctacagggtccatcttctgggaagtaggataattttaggatcactactcagagaagaaaggaaaaggattagtcttcaatttctggaactgtttcctcccctccaacttctcctttcccactggtcatagcgtctttggagagtggctacggttctagccctgaatcagcatctgagagataccattatgcttcaaccacacattcagtagatggttcattattatcaattttctaaaaattattgtgccatggattatatagcatacaaatccataattaaatttttccttcttgatactcaaattcaagggattcaacctggtggctcttccgtaatattagaaacaattcggctgggcgcggtggctcacgcctgtaatcccagctctcagggaggaaagaggctggaggatagcttgagcccaggagtttgagacctgcctgggccatatagcgagaccccgttctccagaaaaaggaaaaaaaaaaaaaagacaaaaaaaataataataagcgaaacaattcctgaagctgtgaccagtatcccatggtttagttaacatggttcttgacatgcgccataaggccttcttgcctaaagcttggctttgtggttgctgctggttctttcacagataatcataactggaagactcttgaaagtcgctgagtaatgtcaaacggggacatttctcatcagagaagctcattcatgggctgcagctagaagatagcaacccagaagtcaggaagagaacaccagattggaagtcctgagaccaaggttctgctttggcttctgctgtgagtcaccctgtggcctggagcaaacctgttaactcaattttccaatttataaactaaaggcattgagctagatgagcttgaaaggtccctttcagttagaaaaaatctatgattcattttgttcaaacaaatcaaataagagtttcatttcctgaagtggattcgtcaatgaaagttgaaatacctaaatccttcctgtctaatataagggccagcaagtggcttcggtgcatttgcagaaaagcaatttcagcagaaagcacttcatgaagggaggaaagtttaaatcacctcacctagacctgtatttcttctctgtactatgtttttactatgtgctcagcatggagccaggttctttcccaaagtcaccaagaaataagttagtttttttttttcttatcttgttcatctttgaatgctgctgttcatatctctggaagttctttttggagaattatgccaatcaactgagcatgtaacagttaaacatgccagaaaaatcttaatatgtttttatctttaaatttcaccaaggttacgaattcagcagacatgaccctacatatcttgatatgtggttctcttgaagattctaaagaaaatgtattgcccattgcagagtcagcatattccaatggcaaaagcacaggataggagttagaagacccagataagagtagcatcactaatccatcatggttcttctccctgcaaagcttatgcacagcctttttctccacacagcgtttgaggccaccattaccagttgatcggagatgggttgtcagtggagaagtgatttaccattctgaactttgattactgttataactcaaacccacaccgtgatttaaggctgatcacatacattttctggacctcctttatcttgtctgtgaaaacaatataatattgcctgtcttgcctactgcacaggactggttttaaggatctaaacatattctgtaagtattatgtgccattcaaaagtcaagtgatggatgctaccaacatttgtgactaattgagccaaagtttaggcctgcatcattaggtcccaaccatctcctacaattacaggtgcctatctgttacctgctgagctcagcatgtgctgagtagtgggctccccaaggacaatgatcccaggatgtttcacacacacacccaggaagccatgaaaacccagagttctggtcccaggtgtcctcagtctctctcaccacactcatctgaggtacaggggaactgacttgtgagccgttacttaggctctgctgatgttagcagggatcattgctaccgtcttaggatacacaaggcactgagctagggcctttcatatgtgttatctcatttagtctcaccagaaccctatgaagaacggacactatgttcttattttacagatgtggaaataactgctctggaggttaaataacttgcccaagcccacacaaccactaagctgcagagcctggatccaaatcaggtctgctggctccaaagcctggacctttcctcatttcttggtcttttttgaccccagaaactataaaatttataatctaaattttaaaacaaatcagataataaagaagttctaagaagacttaaatgacttaaagcaaaaatgtagacacattgctgcatgcactttcaacattactgttctcaaagttgtttaagccaccccagtgctctccccaaatgccatcttttttagggagacattctgtatgtgtagacactgttgcctatacttacagagaggaaataatagactgaattgaaaaaatacaatccatgtgacttgtggctgagatacacctctgtaatatatagaaattgcatgacaactttctgaagaagcaaatccccagagacctacttggagaaaatgcttcgtgctagcaacagcctgcctaacttcttgagaaggtgttgattgaagtgtattagtgagaaggaagatctgcatcactcactgcacatccagctcacagatgggcaacgtgctgaaaaccagtcagagtttccaaaaagtagctctaaactttctttttgagttgcttagaagaatctattatggagaaagcatacattcaatctcctgggcaggtttggaggtggttaaagttagagttagaaatagcctggaacttgaagtgtgtcaaacacaatatgtttgggggcccttctactggcagacatctttaggagggagaaagtcaatttgctctattccttcaattgatcaaggagcataacccccagaacatggatccaggcttgcaatcttgcatgaggaacagagtttccaacaattcatgcaatcattgttagactttttgattgttgttgttgttgctcctaagtagagtatttttataacaggtcttttatttttccttgcttatttttgcatagaaaatgcttttgcaggagcatatgcatgtgagtgcattgtgtaacatctcgcatacagtagatgctcaatgatgggagctcctctcattgtctatgctttctgcatttcacataaggactctgggatgcaggtggtggttgccttgcagagtgcctatgtttagcagtaaacatagactagaccccaggtgtcctgcttccatctctcctccagtcagagcattctaatgactaggctgtgctctacttatagaacataattctcagccctttggggagcatttggggctagattagatgggaaaatatgttcttggcagtatagcttagggtctactgatttaactggtgtgtgcaaagtcaagacccaggagccttggggagataggaggaagacactgttttattcactgaagagtctgttgtctaaccagagggagggcatccacccaagaaactctgagcccacaaatgataggagagaggacagcactgcaggttgccatgaagaggagcagcaacagctcccattcactaggagagttccctgtgccagacgctgtgcatgaggttcccctgacccactgtccctatgaggtaggtgtggttataccagtctaagggctgaaagccctgggattacccagagaaggtgctttacatgcttgattttggaaagaggaaaagatgtattcatcattcattcaacttgtgtttattgagattttctatctaccttaaagtttacagcactgataatactatggtgaccaaaaaggacagagttcttgtcctccaagagtataaaatcaagcagcagagacagacagacagaaagacacacacacacacgattaaaacttgtgatatgtgctaagaagactaagagtatgcactaaacatttgtcatgagaaagtgctaatcatattttgggggggagttaaagggatgtcctctctaagaaagtgacatttaagcggagaactgaagggcaagtagatgtcgattgttggagggaaaacagagggaatagcacatgttgagggccctaaggcaggaagagtttgtcttggaaaagaagaaagggtgccagtcactgtggctttagtacattagtgatgggtatggtggcctaaggtaaggcagtagctgatcccaggcggtctcatggactgtgctaaggagtttggagattttccttaatgcaatgggaggctattagatatttttaagccagggactgacatggcctgatttatgtcttaaaaagatggctctggctggagagaatggattggggggcgggcaaggaggctgttgtaggtgatggatgatggcgacttggttggactggcggcagtggagatggaaagaagtgaatgggtttgagatgtaatttggagacaaaattgacagggcttggcaaggagaagagaacaaaacattcaaggagaagaatgggggatgggagtgggaagagaggaggacacagtgagtggcttggcctggagcagacagaagctgacaagcagcagggccacaacatctctccctctgcttaaccattgaagcccgtcttgatcccaatgccctctatgtcttattacagcaaaatgacgggcagttcaccgtgatccagcttgtgggtatgctcaggggcatcgctgctggcatgaagtacctggctgagatgaattatgtgcatcgggacctggctgctaggaacattctggtcaacagtaacctggtgtgcaaggtgtccgactttggcctctcccgctacctccaggatgacacctcagatcccacctacaccagctccttggtgagtccttcttggcattctcaagtagaagcatggcatgagttaaaggggactctacatggctgggaactgtgacagggcacactgggagggaatggaacctgaactgagctctccactgaaagaccaagatgccaggaggaccatccagctgggagaagccatagcagctggttgttcaagcaagaaagcaagcatttgggcttggactgtgaggaagggtcagtgtctattatgaagctatagtgttccttgggaagaggaaattttggaacagatgatttgagggaatccaagcaggtagacactggtaccagaggcatctgtcagcagagagcagaccccaggcatgcatgaggccttcagtctgcagctgggttgggaactgtgtcactaggtagactcttgatccccttctctcttctctctatattgcttccaaatagctctaagtaccgtcaacacgatgagtactcttaaacttgtatttcctgctcagcctccccctctacattctgagcagctctaattatctatatccaactgcctagttcacacaatttcatttagaactttaacaagccgaaaatagagcttgggatttactctccaatatcctctccctagtccctccatctcagtagttggcaccacttaactaaagaatgaaacctaggaatgatgtttgatttctttctgtgtccatttattttcaatccctcagcggcccccatagggtaccaaaaaatctatccctctttccatctctactgcccccaccctattccaaagcaccattccctttcacctggattgttacagtggcttcctaactggtgtccctttccttttgtctccttacatccatttcaacagcacccaaagtgactgatctacctactaacctgtctatctgtctatcctctttaaacctgcaaaagtaatgcataattattacaaaaatcaaaacaatgcagagaagtaaaaggaaacgccaattagaatggcaatcattaaaaagtcaggaaacaacagatgctggtgaggctgtggagaaataggaatgcttttacactgctgctgggagtgtaaattagttcaaccattgtggaagacagtgtggtgattcctcacatatctagaaccagaaataccatttgaccgagcaatcctttactgggtatatacccaaaggattaaaaatcattctactataaagacacatgcacatgtatgttttttgcagcactattctcaatagcaaagacttggaaccaacccaaatgcccatcaatgatagactggataaagaaaatggcacatatacaccatggaatactatgcagccatataaaagaatgagttcgtgtcctttgcagggacatgcatgaagctggaaaccatcattcttagaaaactaacacaggaacggaaaaccaaacactacatgttctcactcataagtgggagtcgaacaatgagaacacatggacacagggagacatcacacatggacacatgtgacacatgtgaacatcacacactggggtttgtcagcagatgaggagcaaggggagggagagcattaggacaaattcctaatgcattcagggcttaaaacctagatgatgggttaatgggtgcaacaaaccaccagggcacatgtatacctatgaaacaaacctgcatattctgtgtgtgtatcccagaacttaaagtaaaatttaaaaaaaagaataaaaaataaactaaaattcccctgaggcagggattggtaaactttttctcaaacggccatctagtaaatattctaggctttgccggctaagaggcaaaatgaaagataccatgtagataattatataaccatttagaatgtaactaaccccttaaaaagttataaatatcattcttagctcatgaactatcaaaaaagggaccagccaggtttagctttcagaccatagtttacctgcacctgccctgacgcattaattttcaacaattaggtgtgccttctttgacatttttctttttggtcaaaaatttgaaaatttttattctacaaaatttggatcatattatgcctattcctctgtgatctggggtgtcttttgggcatcattgccgccaagattacttttatgaaagttagcaaacattcacactctaccaggagtgtatggtgccgggcttcagcatcctcaccaggcctggaggtgatccaccctcacaaagggttgctgcttcaacaatgaaaaatgatgcctcatttttaaatttcacatatgtctacttttttaatttttaattttaattttttgatttttagtttttgtaggtacagagcaagtgtatatatttatagggtacatgagatgttttgatacgggcatgcaatgcataataatcacatcgtggaaaatggggtattcattctctcaagtatatatcctttgtgttacatacaatccaattatacccttttagttatcttaattaattaagttttttatttttttttattttttgagacagagtttcactcttgtcatccaggctggagtgcaatggcatgatctcggctcactgcaacctctgcctccagagtttaagcgattctcctgtctcagcctcccaagtagctgggattacaggcacccaccaccatgcctagctaacttttttgtattttcagtagagatgggttttcgccatgttggccaggctggtctcgaactcttgacctcagttgatctggccaccttggtctcccaaagtgctgggattacaggcatgagccactgcatctggcctatttattcatttttttgagacagagtctttgtcacacaggctggagggcagtggtgcgatctcggctcattgcagcttccgcctcctgggttcaagcgatcctcctgcctcagcctcctgagtagctgggactacagatgtgcgccactatgccctgctaattttttttttttttaagtagagaaggggttttgccatgttagccaggctggtctcgaactcctggcctcaagtgatttgcccgcctcggcctcccaaagtgttgggattataggcatgagccaccatgcccagcctctttcagtttaaaatgtataattgaattattgttgactatagttaccctgttttgctatcaaatactaggttttattcttttttttttttttttttttttttttggtatttaaccataccccctaccaccaccccctaccaccacccttcccaacctctggtaaccatccttctactctctatctccatgagttcaattgttttaatttttagatcccacaaataagtgagaacatttaatgtttatctttctgtacctggcttatttcacttagcataatgaccttcaattgcatccgtgttgctgcaaatgacaggatctcattattttttatggctgaatagtactccattgtgtataagtaccatcattttgttttaatttacattttcaactgactgctagtgacattgatatcttttcacatggtgcagggatttgtgttttctattgtttgtacgtgtccttatctatttttctatcgggttgtttgttgatttctgagaaacttatagaaagtctttttatattacagacattactcctttgcctgccatgtgtgatacaatttatcttttcccccatctgttattcctttatactgtttatgataccctctggcttataaagtggttaacattcatgtaatagctatgtcttcttgggttacctggtttattttaaaagttatgttcactccaaggctataaaatatttcctggtttcctgggctattttattgggaagggggtttgttttatatttgaatatttagtacctgtgaaatgtatttatttttcccacattttattttgaaaaatttcaagcacacagagaacttgatagaatttggcagagaacagtcatatgcctaccacctagattctggaattaatatcttggtacatttgctttatcatgtaactatccgtctatccatccctctgcccatccatcacaccatctattgttttgatgtatttccaagtgatttgcagacatcattacatatcacccctagccattttagcatacatgtctctaacatgtatttgtttatggttcttttttaaggtaaagtgtgcatagagtaaaactcacaagtctcaagtgtacatttatagagtttttaaaaatgcgtgcaactgtgtaacccaaactttcatcaagatacagaacattgccatcaaaccaggaatccccctaacctcatccctccccattgcatcctcacccacatccatacccagaggcaaccactgttctaatttttttgaccatcaattggttttataacttcatataagtggaatcatacagcatgtgcttttttgcatctggttgctttcacttgcattatatttaagagaaccgttcatgttgtgtgtgaagcaggagtttgttccttttattgctgagtaatattccatggtttatttgtccattcacttgttgatagacaccaggaatattccggaattcatttttgactatgtattgggaagtatattctcacactgttttgttcaggtgaacaattatgccagcactacttattaaatatattattcattttttattgaatcatatgtcatccttgacatattaagttcattatatgaaactatgttttgattctcaattctgctcttttaatctatttattcttatgctcaaccgtgttgtcctgattataataatgttagcaaaagttttcctgtctgtattctgattatagtaattttattaaaagtcttactgtaggttgggcatggtggcctgtgcctgtaatcccagcactttgggaggccgaggtgggtggatcacctgaggtcacgagttcgagaccagcctgaccaacgtggtgacaccccgcctctactaaatccaaaaaattagctaggtttggtgactcatgcctgtaatcccagctacttgggaggctaaggcaggagaattgcttaaacctgggaggcagatgttgcagagagccaagattgcgccattgcactccagcctgggcaacaagaggggagccccatctcaaaaaaaaagtgtcttactgtctgggtaaagcaagttatccttcattatccttcttttaagaaaaaaaaaagcttccttgactgttctcaaatatcttttctttcaagtgcaatttaaaatcttcctgtccagtttcaaaacatgcacatatacatgtatactcacatgtggattttgactgaaattctactctgtctttaggaagattaacatttcaatgatcctaagtcacctaaataatgatgtcagccaaatatacaatttacatatacacgacattaaaagtttctttggtaaaagatttcccacgttatttttctgtacacattatttggattacttgctgtgataagtgtctttgtagatgatagagcttatatgtttctaggcctaagagttctcaggattctacacagtgatatggccacctgtctcactatattttactatcatttctccacactttgccttttattcaaaatagaaaaaattatttttgattattaagcaaatattttttctaaaaatacaaacaatttattcaagtgacaaatatttattgagtatctactatgtgtcaacattaggccacaagctggggacataatcatgatcaaaaggagacattgttactgctctcagttaagtgaggactggggacattaatcaaacacatgcccaaatgagtgcataattaccagctgaaataagggccgctatgttttgcgagagcatgcataaaacaataaataacaaaattgcctaactgtgtctaggagggcttgcagaggaagagatggtgctacagcagagacttaaagaacagtcactgttttagtcagcctgggctcccatagcaagctaccacaccctggatggcttaaacagcggtcatttatttcttgtcatctgtaggcttgggagtccaagatcaaggtgctaactagggatggttggattcttattgagggctctattcctggttatgtcctcagatgccttttgttggcatgtgcacagaaagagagatcttgcctcttcctcttttgaaagcacatcaatcccatcttggggactccaccttcatgacataaactaactgcagtcacctcccagaggctccaccttcaaatatcacccaattggggattattaggacttaaacatatgaatttgggggacacataaacattcaatctacagcattctgccccaactaaatgtggcaggtcggacttcagaggcagagaggcagcatatacaaaggccctgtggcaagagggaagatggagtggaactgagaagggacccctgtttagggcatttggagatttagggaggaagcatccaaggaggcctgtagcagtccatcatgtaggatcttccccaaacgctgtgataggagttgcagccttagagcaatgggaaacctttcatgacgtgtgtgtgtgtgtgtgtgtgtgtgtgtgtgtgtgtgtgtgtgtgtgtgttgtgcacacagagagatgcacacgtgtggcccgaaagtgatggatttgaattttagaaaaatagcctggcttttccttagccttttccttccaatatctttccttgccttctttagaaataactttcttggatttcttcctgttttctttcaccaaaaagccattaagcagactcaaccagggtagatgttctaaacaagggaggcaagccctagcagagatcaggacccatgtgtgaatgggctgctggctcagcaagattgagagacaagctatatacagggagatttaaaaataaatttgaaataatggaaactgtgggaacagaggtataaatatggaaagcataaaagctagaatgaattgtatgctgtggaatcaaaattggaggtattagtgtgaaccggtggttttaaatatatagaaatggagaaataaatataggctgagagtggctttgaagcagtaacatctacatagcaaggagtacagctggctctcagatcttggattccatatactcccctaaaagcaaccaggactcattagagacatggccccttccaaggcctggagagggaaaatgtgagatgagaccaacacatcttttttttgtgccagaaaatgagaaagtactcaaagaataatgggaacatacaacaaaaacaacatccagcttgaagggcctccaaatctggataatttgagcctcacaatatataataatagtaacaagttataatctactgaataagatgggggctattgagtccacactaatatgcatataaatgaacaaatagaaacaagagaaagctcttccctgtagaggaaagaatgatgatgttagaaactcactatttggcaaccatcagattaatagctaattcagataagaaacataaatggatgcttaaacttaaggtgaacatcaggagagaaacaggattttacatatcttcaaagtttctccccccaaaatatttatttattacaaagagggagaaagtaactttacagagaagtttggcaaatgccatctgaatcaagtgattaaagtcaacatcagcaataataggacaggtaaatattctgtgcaacttagaggatgcaatgaaaagaacataatacttgcaatactctgttcaaaatttataacttgggtctcatcatgagaaaacatcagactacctaaaactgaggtacattctattgaatgtgtggcctatgcgcttcaaaaaatgttagggtcgtgaaagtcaaggagacagagaaactgctccagattgaggggcatgatactgggtataccatgtgatccttaacaggacatctctaggacaattgttgggctggaatagggtgcctaagggaagagtgtacaggcattcattgtagtattcttgcaacttttatagatatttgaagttgtctcaaaataaaatatatatatttttaaatttaccttgactgcagcatggaggatgggtgggagaggcactagtagagacaggaagatgcatcaggaggctacggggcaatgggcctgggatgcagcaaatgaatcccagaagttctagtggggtgatgcagaaggacttgacagcagatgccacttacaggtgaaagtgacagatggcggaggatgactccaagtatccagcctgtgcctctggatgggtgatggctccattctctgagagtgaggatgctggagagaaattggttgaaggagtagaagagttgggaatagattgtgggtttggttcagaatagttattctcaaattctcaattctcaaattctcaaatgttgttgagtatcagatttacctggagagttaatacagagcacagaggcacagactcattgaagtagaatagtctggaccttttcattgttactaaaattttccatatgattttgatacttagaaaattctgagagacacttgtttaaacattttgacttttatatgtctataggatatcacagtagagctgctgaatagggagctgaatatgtgggtttggggcatagaggagaagtccaaatgaagatgcacatttaggagtcatcgttggcatacaaacagaaacaaaacagtgcgtgcaaatgtacttcatttgggaaaggatagaatgggaaaagagcctggttctggacatgaaggagcccagtttgccaatacagatgtacataagataggaacagtagctgtccaattgtcccttcctcctgacagtcaattaagaaataagaatttgccataaacccaacctcctcacttttggatgaggaatccacagcccagagtggtcaagtgagttactcaagccacacagcgtgctattgcagcggcagctttggcccttccatctcgttctccagactctgagtccaatgctcaggacactgtgattccctctctggccccacagtgtgccagactccctgctcaactttggtcatttgtgatgttctagaaagcctgtttctctggctttacttttccctcttttcctctcaaaggcccagcaaaggattctctgtagagtccaaatcagccgtcatctttgccactggctctactggcccttggatgaggcacagagacgcggtggtattgcatccctctccaccccatgtacaggcagagatgggcagacacttaacttttacttattcttgattttcagctttacttctttgcatttacttttttcatagttactctagaactaacataataatatgtaacatatgcatatataatatatacgtcttaatttttcctagtctactttgagttcatattgtaccactttacataaaatgtagagaccacataatcatatcatatagatccatttaaccatccactcccactgctctttatgttatcattgttatatatgttccatctacatacatttatagtcccaaagacaatgttacaatttttgctttaaacagccatgtgtattttaaagaaatcaagaggaaaatgttttacattgcctcaaaatagttatcatttctcttgttcttcctttattcctgaagatccaggtttccctctggcatcattccttcagtctgaagaactacctttaacattttttgtagtgcaggtctctggcaatgcatttcttagttttctttatcagagaaatgtctatattttgcatttattactgaaatatatttttgctagatatacacttctggtttatagtttgggttttctttcatcactttaacattgttgtttcattgtcttgtggttgccatggcttctgatgagaaatcccacagttacttgaatcattgttctcctacatatatataagtatgcacacacacatatatattcatattcgtatacgcattgtgtcatatttctctggctgcttccaagattttctcattatctttagtttttaccttggctatgatatgcctgagcatacttttttccccaaatttatcctgtttgaggttccctatgctttataagatctgtaaatgtctgtctttcagtgtatttgcaaagttttcagccatattcttcaaatatcatttttgttcttttttcctccttctggtagggctgcagttatctagagggagaagttttgaaaatgttccacaggttcctgaggctctgttcattattttccctgattttttcttctctttttcaggtctactttcaaactcattgattttatcatttgccatctttgttttgtttctgagcccttccggtgacttttttctaataattgtatgttttagagctatattttctaattaatccttttttatagttttcagaatctcagctgatattttatctttttatcattcataagcatatttttctttacctcattgaccatagctaccatagcagctttaaaatctttgataatgttaacatctgggtggtcctgggattagcatcttatttgttttttcccatgaaaatgggagacatttctctggctctttatacatctagaagtttgggattataaacatgaacgttatgatgtggtgattggattctgctacactgaaccagagtgttggtatttttggtttagcaggaaattaacttggttagactcaatctgtaaactctgtcatgtttgcagtgggcaacagctctttatggttttcaatccgtcttatacatgcgtgtttcgggggtcagctagaaaattgggaaaactttatacacagaatttggtattacctttcccttgttatcttgtttctagggattctccctcaactctccagcagccctaattgtgctgaattcgttcccttggttcctccagtcagaaagacagtggggttttctattggggtttgagccactgagcagactatggctgcccttagggaaaaactacagaagataaaaccttgtgctgttcagtttccagaaacttcagttcatttttcctgtattttctttttccttctcttgtgtttttcttcctttgttgtttgctagagtccatttgttagaaacatactggacaccaaaagtggaacattcagcttatccccctaatcagcagttctataagacagtacttaagacctctctactccatcttaattcccctattttatgcagttctttcaagatctttttaacatcaccatcttctaatacatctggttttactttgtaagtgaagacctcgttaatagctattaaagttttctagtttttcctaccaggtcctcaaacttcatctctcactctgccttaattctccaccttgttttcccccaggtgttccttctgttttagatcgctatttctagccccaggagcatttccttcccaagaagctcctgaaataatgaacagatcgaattttctcctttgcgctttcttatgattggaataaatccactaaactaaggaatagttctgaactgctactaatattcctgctctttaagagaaacagacaaatgagctaggctggactctgaacacttgcatggtttacgcaactttgtttttggcaggtatatttctgaatgtcgttatgtgtgttcaaataaacattcccatgcttctgttatagactagttcttgatgtttgacctcacaggtcaccttctcattattactggttctgtctaatgttaccaagagaaaagagggcatgcacataccaggaaaggtgtcacatctttgattaacttattgcatttggagctcacgtacacactcacaaacttgatctttaccttttatcagctgacattggtgggcagagctccaacaggatcccacaaatctctggatagcagctttatgctggttaaatcaaaagctctatttcagcatggctttctttctcttctgatcagtaggaagaggcccatccagtccctctgtgagcataattttcccttcttagtattcagtcaagttccttctgctaaagtagtgtcaactttcccatccttcagagcccccaggctgtctctccaagaagcctccagctttgctcgagccttctgcacagccgtgctctctgcaggcctccctgtattatcatgaattgcattaagtcttcaaggcgcctctgatctccctcagccccttcccctttgactcctcttgcagctccttcctcttgtctcaaactcccggttcctctcacactctgtgtttctgccacttctgagactccctttcttccaagcccgccagttcctcctcctccttactttctctcttctcatgtcagctgatgttctctgccctgctgctgtttccttctgggaactgcaaacagaaccattccttggccatctgccccctcctctcaggccatttgccccctgtgctcttgtccttcctggatcattgtccctttgtcagctcttcctcacatgctgccctggtggttgctgcccctctttcccacattaactgcttagatccacttggggacagctcagctcttccatttcctctagaatctgctccatctgcatcagactcatttctggtactgctctagggcaccaggcatgaagggtccagcctcccctcatgggacaagggacagcctttctacaagggtaatctctgtaagcacctggtgccatggcccatcctgaacctgctggaggaagccaggcctgtcactcatgtgcgctccagaggtctttgttctgtgacgaatttcagtcatcccaggtcatggtgtaggcagcaccctcatctcaccaccaccaaccccacacacacccattatccattattcccatgaattattgtctcagctgcagcctccatcctcgctgtgcttccaggagagagcatgcatttcagccacaatcgcttccatgctgaaatctgtagggcccttcctttcacaaaattcggccttcattcatgatattgtactgcccaattgatccctgtgttcagcaatgtcgcctgagaaaggggcaaaaagaccatttctagaactttctttcccagcatggtgtggtgaaatagttctttggcatggtacgaggaatgcagggtttggatcacactatgctttatgaacttgggcctagttctcttcatccataaaatggggtttgtatgattttgttagatttgtaaaaacccatctgataaactggtgaacatgctaggacaagttccgtcctggtcacagcttatatgagtgttgtggatgctaccataagtgcttccccatctctcagaatccctatcccatggcaagagatggcagatgtacagttttctttttttcttttttcttttttttttttaagacagagttttgctcttgttgcccaggctggagtgcaatggtgcaatctcggctcaccgcaacctccacctcctgggttcaagtgattctcctgcctcagcctcccgagtagctgggattacaggcatgcgcctccatacccagctaattttgtatttttagtagagacagggtttctccatgttggtcaggctggtctcaaactcccgacctcaggtaatccgcctgccttagcctcccaagctgctgggattacaggcatgagccaccacgcccggcccagatgtacattttaaagctaactagcgaaaaggatcctataactttctcactttccagtcactctataacagaaaacaataaggcagacagccaccagaaatccagaaaagctgatattcgcgaaggaaaattgaggacctcgtggcaggatcaccatgggaaaattctgaggaaaccctgtcaagagagaacaggggaaaagaaactaaaatgactgtgtccattgaaacctgtggttctcatgcttccctggggaccagagtttcctggagggcttgtaaagacacagactgctaggccccacccaagagtttctgattcatggatctgaggtggagccttggaatctgcatgtcacgtgagttcccagatgatgccgatcctgctagtcctggaggccacttgaaaaacctcttcattgaaaccgtttcagggagcatgaattttatttcacaaacttgcattgtaagaaatgtcaattaccgtatttctcaaaaatccaagtaaatctgacaccaaatccccatcctgtcaggctggaaaagaaagtatattttcagtcatcttagaacttctccttctccaagcccagggaagcatgaaggccccagaccacacttgggctccagcatcttttcacggggtggcaacacctgtgctgtgactcaacttcccagatgcccacccagccatcacgttgtctgagaccgaggagacagcgagggcacagggccagtaggtgccgccagcacaaagctccacaccagcatctacctctaggtcctgggaccctcattctgatgctgctacatctgcccccataacaacccatttcccagagtctgaacccctcccctcatccatcaactcttttgtggaaaagaaaaagcaaaaacctatcaaatcagccctggagatcctgaggattggtatgaaggagttggagacaggtggataaaaattaccctcagtcttgagccgggcacggtggctcatgcctgtaataccagcactttgggaggccaaagtgggcagatctcttgaggtcaggagtttgagaccagcctggccaacatgatgaaacctcatctctactaaaaataaaaaaattagccaagtgtactggcactcgcctgtaatcccagctacttgagaggctgagacatgagaattgcttgaacccaggagatagaggttgcagtgagccgagatcatgccactgcactccaacctgggccacagagtgacactctgtctcagggaaaaaaaaaaaaaaaaaaaaaatcaccctcagtcctgagatttttctacaccactgaaacaaaaatatgcaaattaacacctcaatcatttccattgttatgcatctatcagtgaaccagatgccctgttaactggggtgaatctcaacaaagaggactttcttgcatcactttggttgcaaagccccatcttttctaagtaaatcactgttcaaggaaagaaggcagttcggtgtgcctgatgggggtcacctgtgtctggaattaaaaggtcttttctcggcagggaacttgctagggtgtctttcaaagaggggatccataagagaaaaggtcaagaggatgccaaaaccttagccttaggggccattcccttcctcctgccaggccctagacctgacctgcacaggagatgtgggtgccacaaacagcccgagaccttcttggctttgacacagccaagatgagtagcagacctgccaccactgtccctggtagcagcagggcactgagggcagtgctgaggataggcatcaccgtgtccacactgcccagacattgccgctccaccagggaccagcagtgctatgcagagtcctcatgggtagaaaatggttagggttaggggaactctgtgatgaggacaaaaagactgtgaacttcccctaaagcctgcaatgaataactcccatcagtaccacacacacacacacacacacacacacacacacacacacacacgcacacggggagagagagagagagagatgtgtgtagtgtagttatgcacatgttgttacgcaaagcatagttagagatacacagtgaaattcagagcgatgtacacacagaactatacgcaatcacccagggctacccagaaacatacaagtacaggcacaaacattccgagtaggcaccaggtaatagctggacttttttctctcattacccctgagcagtgagtttgactgcaacagtactctgtttcagatttttttaataatgcacttagtacattataaaatgtgcaaagaaagcagaaaattatctccaagataatcctttctgcaagattttcaggaaaaagctgtctgcactttgctgcaccactgtaagaagttgcttctcagtcgggtcgatccatctgcctgatagattttggctaaggctatgaccttcatctgtcagaacgggcaaggtttactggctttctgtccagtgaccccaggtccagctttacttctccccatagctcctggcagtatttacatttaaatcatagttttcttctcttctgattcatggcctgcctcatgaggcagttttcaaattatgatttcttactcatctttcaatcattgagcttgggtagcagggctgtctcttgggtgggtaggaaagtggagagggatgaagacaagcaaagacaagacagagagaccctttaattgaagccaggataaaactgagtcctggtcccctggaaattctgctctaacattaattaagctgagagtaaaataattcaaatgccactctatccccttttccaccactcaaataattcttcttcaggcagatttggctcctccttgctctgatatctctccctgggtcactttgttaccaatgctcagttagggatatcaggccctgactgaaattcccttttgaaaaagactcagcataattattcttagtaaggcctgtatattattagcatgggtgggatcagtatggaatttcagagcctgagccagcatgtacccagggactggaacaaggagtgggtcaggtttctcagaaaacacatctctccattctgggccccacaggggtgtgatatgcaaagccctcttcctcaatatgcctgtcatcatgtgggaggggccagccacctgggtgcaggcccatgcagtgcctctactggctgttctcctagccaatacatatttttaaagcagctaatatgtgcataacactgcagttaacaaaacaggtagttcctgagctcctcaagtttccttcctagcaaaaaaagacagacattaaacaactaattatgcaagtaattatataattgcaattgttaggtgctatggcggagaagcatatatcaagcgtgtatcacaagaccctgaagaaggaacacctgtgttgaagcccaaggacgaaaaggggttaattaggggaagagcatggccagtgcctccctcatgggaatgatcccagagctggacacagactctgcttgctcagcaaggacagagtgtggaggagaggagggagttggaggagcctgagctcaagcacaggtgggggaagagttgccctcccacagaaaaggcccaagagatactgaaagaaactgaggtagacgtaagcctcatcagaacagaggaggctagaaagtacttgatgtgcttactggatagtgaacaggaggcctacttggctagtgtttggaaaagagtgtgaaaggtgtgttagctctggaagggccctgggatcagttgaattgtatccctcccaaaaagatacattggagtccttacctctggcacctgtgaatgtgaccttatttggaaataggcttttgcagatgtaatcaagttaagaatgatgtcataatgcattaggattaagtctaagtccaatcactggagtcattaaagaagggggattagacaaagacacacaaggagaagatggccatgtgatggcagaggcagaggttgggtgatgccaaggaatgtcaaggtttgctggcaaacaccagaaactagaaggagcaagtcaggattctcccctggaggtttcagagagagaatagccctgcgaaagccttgatttcagacttgcagcataagattttagaaaaatgtaaaaaacaaaaaatctttataactcttggttgttatgttcactgagttggcaatgtaattttgcagaagcattgccttccaagagctgtgaccacaagatgttaaataacagggactcctccggtttctaaagccctgatcagccttgatactgtaggagtctgcaaatctgtccagttctgtaagagtcctgtgcattgttacagaaattgataaggaaggcggggatcttgtcccatgcacccagactaatagggctccagaatgttgtagtgtttgccttatgggccctacacagagcagaattccctcacaaagaaggcctctggatctagcacatctgtgtaggcaaaatgtttatccaggtaagggtaactaggcccttcaattcagctctccaagagtacacaggcaagagtttttttctaaagaccctggtagctcaaaaccagcactatcaaggctaatcacattatacttcctatgggaatgctgaattcaacaatctgaaggtagtcaagaaactcatccagtataggctacagatgtctagggaaaagagagagtgagtccaagtcaaagcaagggggaaagagagcagctgagtgaggaagggaaagaccagggcatggccaatcaaaggctgctctgcggatgctcaccccgcaggcattctagctgcagggggaatatgcaggaatgatttcagaaatgaagattttattttaatcctcccacaaaagcattcaagtaagctctttctctgtgagaaagctagagagtaagaaacaggaaaggaaggttctcagcgaaaagatccatgtcgacttctaatattgctcacttagagaatacatgccatctgggcgtttgataaaaagaaaaaagggcgtagagaaaagctcaaagccatggattctgcttgtgagtgcaaggtgctcgcctttcctcatggccagctctttcctttgttggaggcctttttttttttttttttcctggtcagcaatgactttttcaaagtgacctgtcaagtcttcctttctttattccctgtggccaaggagccaagcagtgggcaaagaggagagaagaggagaggacccaggtgacaagggcaaggctggtattttattcattaattgtctgagtgttatctataaaatgcgaattcacagcccacttgtgcctgaggctgaccccagcatactcacaacttgctactccaagccagagaggacaagaatacctgccttgtcttcatagattttcatactgtctcttagaggtgcatgttttgggcacaaaatccagggctttctggcccatgacttagtcaggagtggtcatgggtctctcactttagccctgtcattttgaaaaccttttcctttggaaaggaatttggcccgttccagggactattgaagacaacagaaaaccaaagagctaagcaattaagtttatgtgcttctaaattgacatccccaataaaatgatatgaaatggctttgtagctggatattctaccctgagaaattagaagggcaaaagtttggccaagaaggggatggggagtgggtggaaaatattttaatatcactttaagatagcatgtgttcttcccaattttcttcccattgcataggctatggttctattatccaaaaataatgattatttaccttactattctatactagttctctgtactagaaaattattttagtaagcaaattaggcaccatcacttaaacctcattattcatttttgttgttgtttatttgttttgacttttggtatccattaccgtactagtaatcattatcttcaataataaacacagtgaactcattctttccttgttctatttttcaatgtttttatcacatttccaatcatttagcataataagtcccaggagctctaatgacagacaatctaacgcacaggacttaacaggagataattctgaatggtggccccctcagcagttgaggctgaattttgatccagaaaacatgattttagttctggttctaccagttgttaacttggagtcagttactatacctctctgaggcttcattccattatctgtcaaaggggatactatattacgcctcatgtacatcacatgactactgtaacgatggaaggagacatattgttttgaaattctttaagtaaacccctaatgtcctaaaaatgtaacaaaataaaaaatattacaaaagctgatgaattagaatcactagtaaatggttctagatcttagtaaaatacttttacttgatttaggggggaaattatttcaagaatacatgacattctaaatataattattaatagcaataagcagaactatttcttttcagctaataatgcaagtggtgggatcctaatataaaatttcaccaatgtgatgcaaagagcacaagcttggatagccaaaaatttaagatcaaaatttaaaccctggctctgctcctaacatattattgtagtaacctaagtgaggtatttacttcatgagcctcagttctctaatatggggataagaacttacattttagtagaagtatgaagattggatcataataaatatgtacagtgcccagcagaacagttgatgcctagtggatgcttgaaaaaatgtccatttgctctcatcttctctgagatgcctcataaaatgggaatggggatccagcgtgttctgttccatgcctgtttctccaatgcaaacgcaatatgtgattggtaaatgggggagtgatgccagtattgtgtggaagtcccgcggttctcatatgatcttttctaggatatttatattttgaagcaaataggggcacgctttcttccaattaaagagaaagccttagcacaatgagaagaccataagaaacaagttgaacactgaagagggcctttctttcatgcaaatagtggccggcttcgtggtttccagagccactgtgtttttcactctgttttctgataaaacagggagtaaacatgaggaaatggaacacattttcctttgtgttaaattttaattttatgacaaaacagtctacacattggattggatttttaatttggatgaaactgatctctgtgagatgtgaatgccctcctggacctatgtctccaagaggaagcacaaaaatccagagtttaagcttgcaaaggatcagtgaaccaatacactgggtacaaatgcaaattataatttacctgtgctgctatttttatgaagattgctgtgttttttgttagatgttgaatggtctcctccaaatgcattttctccccataggctctgttattttattgtgcaatttcgcagagtatgaggttttactaaaatatgtatatgaaattatagcagaaatgcctgtattaggaaattacagtccagtcaatcacattcagaaatcatgtactacacttaggcataagaaatagttgaaacatcagtaagcctaatcatatgagaccatttgacatcaaaattaagacacattagaacatatacttgaatcaaaggaaaggaaaaatgtaggctcacccattatatatgagtctgtccacatgggagatgtggccagtcctcttctctccacatcctagagttttataggaatgggccagggcactgctgggtactggggaaaccttgcagggctccagaccaccaccttgcttcaaccacagcagctcctctcttacctattttagatattatgcttttaccaaggtttcctttcaaacaagttttgccaacatgagttcagtatttgaaaagtataggccatcaaacctgatgataatgggttgtttaatgtggtcaacattcctgtccccaatcatactttttctaagcttagaagagagtttacaaaccatgtccaatactggcttttaaagaagagtgagagacactttattgtattttagaagttccaaagctaggagattgtccatattgcattttatttattatccgtatttgaagccatgatagagatgtcttggcgcactcctcattggcttctctataaaaacaacttcaaaaagaaatgtcattgtttggtcagataactcttttagatacctgatcaattaacaagaggatttttaaaaactttatttgaataaaatttcaaaaaattgtttgatgaataagtctacaccatggatcaaaatattaacattgttaaaaccaatccctactgaaataaatgccctctggaaccttcagtctaggatcaagtattgcatttagttgtcatgtctctttaatctcctttaatctaaaatatagttatgtgccatataatgatgttttggtcagcgacaaatcacatatacaatgctgctcccatattatattactgtatttttactataccttttctgtgtttagatatgttcagatacacaaatattattgtgttacaattgccaacagtattcttcatagtaccatgctatacaggtttgtagcctaggtgtgtagtgagctatcccatttaggttagagcacatacactctaagatatttgcacaacaacgaaatcatctaacaacatgtttctcagaatgtgtctccattgttaagcaatgcatgactggatttccactgattttctttgccttttatgacattgacttgtttaagaatacaagtcaccttttttcattaataagacattcctcatttggcatattttctgatatttctcataattagattcagattctacattcttggctataatcctacataaatgttgtgtccttcctaggctattatattttgaaacacctgatgtccatctgttccttattggtattattacttttgatcacctggtcaaggttttgtccaatttctccaatgtatagttatgtacagtatatattacatatttttctcttgtgactaattagcaatctacaggaaaataatgttaggccatgcaaatatcctgctcctcataaaaattcacctcactgccccccaatttcagcatccattgatgagtcttatctgaactagtctttattatcacaacgggaaaataatgtttttcagctccagccaccatataccagtgagcacttgtcattgaaaagaagatattttggatggtagttccataatccagtcaaatgttcctttgttctgcttagaaacccaacctaatgacattttgaacattacattctctttgatttttacctgagaagctttggaatgacctttggccaagaacattaagattctcatgtgtttccaggccgctgctccctgttctagtctaaggcctttcagacctagcttattccatcactctctgctctgcctgcacctttgatttatatctgtctgggatttacttgaggggaggggagagcacgttgaggggggaagcagacaagctcctctctgctccactgatttgctggctgtttaatttctgtttctgtcttcacacctactctgctgcagagctaggatgccctgcccccacctccacctgtcctcgtttcacccaccctttgccacaggcagtaaaatacagccctgaagggcccagaaagatgcaaggcgtaatccaaaagatgtatctcccaatccttgggagatactaaaatattcctgtaggatgcagaacctccagggtcaacaaggcccgatgggaaggcttttgcttgccactgacagatgtcacagagcttaggcccttccctgggcttctcctgacttgtggttaaggattctcttctgagccatctgagttcctgtgatgccatcaaaatgagtaagttctctaaccttgggagaccatggcattagagaaaatggaaattgtttgcgaggctcgcagttcattagcctcatataaaatgaatttggaaccctctgaaaagaggagtttgggggcttcagctgaaggtactgctatgactctcaagattccataaaactctggaactgaagccccacagttcttggcagagctttcagactgtggcaagtttaggaaggccacacctcaggtgagtggggatgatgatagtggccaccaagagccacagggaaagggtccagtcccaggttggaggaggggaaactgaggtgactctgcctcccactctgacaagcccagctgcccttgggacagccatactgtaaaccgtaggcccaagcaggacaggcagggaagcaaagaccagggttctagacccaccaggctgggtgaaagttaggtctgggaatgtgggagcaactccaagggctggttttctaaggaatgggaaaatggaaagtaaatcttaaagtagatcaaacaataaagagattagtcagtggggaaagaacaggtaagatgcaagcagcatttgctaaagcctaaatctagctggggaaccccagcttacccccaagtggggtttctgtagtgcaggcctaggcaggccaacggcatcagtggcctcaagaatgaggattggggacagctgtgggcagcttggcccatggtccagcctacactacggcttgcatgctgctcttgcaacctgtgccctgtctcatggcagtttcctcccacatcctgctcagtagctcttcaaagcctttgccacactccttatgtccctgccctaccgcggcactcttctgtcccagcagctggcctggcttcctcttttatcacagtacctctgagctttcatgtgctgctcagtaacagtttgtggaatgaattaagaaattcacgaacgagtgacagacatgcccctggagatctgagatatcaaggagaatggtcagtgtagaatggggcaggagcccgagtactcagggagcagtatggctgcccccaggcagctgggttcttcacagtaggaagagacctttcagtttctgctcttccaaccctgaattcgactctttccctgtggctctgcacggctgtgataaccagccccattcacctacttttggccttcaaaaccttctactttcttcccctacacctgggggaggaataatcccagaacatgcaggagaaggggcttattggtccaacttggaaggttgttggcctatctgaagaaagaaatctctagaatgccatattttttaaatgttattatggctttatttaaaaaccgatccatcattttcttaacacagtcattaaggaaaaaaaaaaagaaatcatgtcctttgcagcaacatagacggagctggatgatatagtcctaagtgaattaatgcaggaaaggaaaaccaaataccacctgttctcacttctaagtgggagcaaaacattgagcacacatgaacacaaagatgagaataatagacactgcagactactgaagggtgggggaccagggagacatggattgaaaaatccactattcagtaccatgctcactatttgggtccaatatacccatgtaataatcttacacatgtacacctaaaataaaatcatctaaaataaaatctgaaatttaaaaacaaatgaagtgcttcaaaacatcaaaaaataaaaatatgtttaaagtaaaaagtgagtcttacacatgtacccctaaaatgaaaccatctaaaataaaatctgcaatttaaaaataaacaaaatgcttcataacattaaaaaataaaaatgtgttcaaagtaaaaagtgaaactgactcccccttccaaattcccagaaattactatcattcatagtttggtgtgctttcttctcctctttactgtgtgtgtgtgtatgcatatgtgtattttttgtgtatacattttactctcaaaaaaatggtctcataccatacataatgatctactcataggctgcttgctttgttacttaatgacttatcctgaatattacctttccccttcagcgcctcacttcatgcctttggagacaagctctttttaaatggtcatctaggtggcttctgatgctatgttatttcaaacaacatttcagtgaaaattcttatatagacatgtctgtgcactcgtatgtatatttctataaaataaatttcaagaagataaatttctagatcaaagaatttgcacattaattttaaaaaaataatgtcaaacttaaagaaagttcccagaataagaataatacagacaacactcatataacatttgcccggattctttacctactgttatcatttgaccccatttctttattatttgctctcttcctttctctctttctctctctgtaaaatattttttctgaactcttggaagatacgttacatacatcatcgctctttattcttagactcttcgtgtgtatttccgtatttcctaagaatagggagggatattctcttacataactatagtacagttatcaactttagtaatttaacatggataaaatacttttaactagtctactatctatattctaattttgtcaattgacccaaaaagtatcttttttagcctttttttcgctctagtacaggatccagtctagcttctgagactgcatttagttatcatgttcatttaatatcttttaatcaggaaaattttcacaatactttttaaatttttaaaggatacctttcaaatattgtgtaatagactcttcctcattttgagtttgtctgatgtcccttcatgcttagattcgggttatttatgtgttgcctaagtgacagtgtgcccttcttagggtattgcttctggaggcacgtgatgtttgcctgtcctttgtgtgatgttaacttgtatattttaaattttggtagctgtttattcccccaaagccttttgccaatttatattcttgcatagcttacgagatttgcccattttcacatcctcttcctcacacagagagtcatcagtcttagtcccagtgtaaatgtgcttattcatgctttatttaaaaaacaaagcatcaatgttttttcccattttactctgaggcactttaatattcttaatattcttatctctcaaccaacgtttctcaaccatcaaagatgtagtaaactgacatgctcttttatatcccagagctcactgagagtcgggcagtctgaggggtgacagcgtgggtggggtgggacccttggctgacagggactccatgctctgggaaagtaaaacacaagccaatccttttgtttttcctttgggagatttttatctgccctccatatgcaaggacacacttctccatgtatcttctttccttctttcctgtcatccaatatgaggaaaaggcagcatgggatctggaatgggaggtttcaagagcacccccccactttttaccaggtgtggacccctggtcaccctcctctcctgtccagttcccagtgcctgttaaaagagactcagaatacttggtttcatccccagtatagaagatacacaggaaggagctgccctcccaatacagcctttgaagcagactctgcccctccttggccatccctcaccaccaccagaggagggcagacagcccagagagcagggctcatgcagggaggcaggtggagcagctccgtcagcactggcacactctgccagcattagctaacagctcctcatacgcccctctgagataattaagtattattatccctattggcaggtggagacggtaagacagagtgtttaagtgacttagttgtaactgctgggattgtttgcgggagaaaccatgccaagaaggaagtgcagttcaggaggccagaattgcttaagctatttaatgtgactgattatttttaaatagctgttggagggcgggggcaggaagagagactagaagcatggccagtggacactggtaaggcattcaaacattgcaatgaaaagaaggaatatacctagtgtgtctcttaaaacgggttgccatagacagtctgtcagctgcttaccccacatgaagaggagaaaaaataattgaaggccatgataaggacaatagaaaacaccccacagccttcccacagagttgtacagaggtctccaagttggctaagcaggggccagtctccatctgagagccccaaccttctccagagacagagcatccactggaatcagcagccccaccagtagccactcgatgtcagaaggacttgccagctgtattgcctgccgtagcaagtgcagcttcacctcagagcagcaggaagcccatgtagcctccatgcacagggcagggacagaatgggagaagagtctgggtgaccaagggttgttggggagacacatgcgaaaggtggaatggcatcatggcctactgatggatggaaaccctggagacatggggaaaggcccaggggtcactggtgtggcaaacagactggctgacagagaggaagctgtggtctcttaggatgagcctggggctgagggtgggcagcagtgaggcatgggtgcagagaggctctgggaaaaagtacagttcctgccattgtcagagaagcaatggatgaaacactggacgtggcctggaaacagaaggggagatagtggggtggcctctgagcctcctcctgaacccttcttgccccctgttccatggtcctccatgccagcctgtcacccagagggcctagaggctcattgtcccctccccacctgccttggaggagggcatttttgtttcagcagcagggcaagtccagccctgcttactacattcctgatgggatgctggctctctctgttcattatcagtaccccaccatctaggagagcaaagtgtctagagaagctaaagccctttggggtgagtccagttgctctttctccagagcactcacttcaggaacactgatagcaggacccaggcttcagggactaaacaaggagagaacacacctgcaccattattttttatttttattagcaagatctaaattagggtaatttaatttaaatttttaaaataattttggcttttactttagatacacgaggtacatgtgtaggattgttacatgggtgtattggacccaagtagtgagcatagaacccaataagtagtttttcaacccatgcctccctccctccctctcacctctagtagtctgcggtgtctgttgttcccatatttatgtctatgtgtgctccatgtttagctcccatttataagtgagaatgtgtgatatttggttttctgctcctgcactaattcatttaggattctggcctccagctccattcatgttaccacaaaggacatcatttctttcttttctatggctgcatagtattccatggtgtacatgtaccacattttctttattcgacccaccattgatgagcacctaatgttgattccatgtctttgctgtcatgaatagcgaggcgatgaacataggatctgcaccactaaagacctgactacccctgcgggattccctggacagtgtcctcctcagggcagaagggatgctgtttctttgccctttattgtccctggcctggctcagagaggggcctgcttgtcaaatgaatgaaggcagctagttaattatttagcccttgtctctccatcctttctttttaattgtaaactcaagaagcactggataataaaaagaaataataatgcctgtatcctggccatcagaggctgttttgggtgtggatagtaaaagagagctgtttgcccagtcagtatagtacagaaaaatgacgtctgtttggttgaagattttttttccagttgggaaatgtcaccaagtggcctttctgttcttcacacatgaaatacacactatcatccacatatttttagttaatttatgtccaaataagcctttttgtagctgctggaaaattatatttgggctgcaattacctttcgcagcattgcacagaagggtttcagcgctcacaaagctcaggggagaggcagcaaggaccccacccgattgtaaatctttccatttgtagttattcaaatcacatattttattactagtacgaaatacattctgccattcattttggaggagcagctaatgcttcaagaaaagctttgaaaaacattctatttagaaacaattttgtcagcagctaatgctatgtgtctttttgggttgtcttttctcccagctctcttctctgttatgtgtgccatttgcatgacaaacgagaccatcctctccaaaagctcacctgttcctgcagcctgcttcccacctcaagttttcattctctgtatgttgcatcataatccttagcacggtaataaattacagtgtcaccatcaagattgtggcttctggaaagaaataagcagcagggccagatgaactctttcagaagatgagagactgttttcatgcaaattcctggcatcctggggaactgggaacagcctctttattatatagactcagttgcaattcagcagccagaagccatttccactagctgttagaagctggtgacactcagagcaagataaccttttaggcaaaaacttcttttccttcttagttgttatgagtcttgtctggaaaaatatcactttactcattagattgaggaaaatgggtcagtgtactttcagagagcttttaagttgagacatttattctaaaatacctttctaatttgacacagaaacacttgcagctcactttagagcagtgcagtagacagtgactgtggaacaggagcaggggtgtgccacatggatgccccctgagggcaggcccatctgtgtgtgaacttgtctacaatggattgcacagaccctcactcgcaagcaggtgctatacccaggctggtcaaccacacagtcaggagggtcactgctcgaaggcagagtgtccaacctgccaactccagggtgactcttgacatacaatgtaaactttatctcaatttgccctccatttcctttgggccacagatatacttgacagaaacattaatgaggccaatttgctgctttttttcctttttcatcattttaagatcttttgaggcttagtacaatgttgaaaaatatttgctgtattagtctgttctcatgctgctaatgaagacatactcaaggctgggtaatttataaagaaagaggtttaattgactcacagttcagcatggctggggaggcttcaggaaacttacaatcatggtggaaggggaagcaaacatgtctttcttcacatggcggcagcaagaagtgccaagcaaaaggggggaaaactccttataaaacaatcagatcttatgagaactcactcactagtacagtagaacagaagggtaactgcctccatgattaaattacctcccactgggtctctattacaacacacagggatcatgggaactacaattcaaggtgagattcgggtggggagatagccaaatcataccattccacttctgactcctcccaaatctcatgtcctcacatttcaaaacatagtcatgccattccggcagtcccccaaaatcttaactcgttccagcattaacccaaaaatccaagtccaaagtctcatctgtgacaaggcaggtctcttccacctatgagcctgtaaaatcaaaagcaaattagttacttcctagttacaatgggggtacaggcattgggtaaatacacccattccaaagggaagaaatgggccaaacaaaggggctacaggccccatgcaagtccaaaatccaatgggcagttattaaaccttaaagttccaaaatgatatcctttgattccatgtctcacatccaggtcatgctgatacaagaggtgggctcccacagccttgggcaagtctgcctctgaagctttgcagggtacagctcccctcctggctacttccacaggctggccttgagtgtctgcagctcttccaggtgtacagtgcaagctgttggcggatctaccattctagggtctggaggatgatggccctcttctcacagctccaccaggcaatgccccaatggggactctgtgtggggcttccaacctaacgtttcccttccacactgccctagcagaggttcttcatgagggctctacccctgcagcaaacttctgcctggacatgcaggcatttccatacatcctctgaaatctaggcagagatccccaaacctcaattcttgtcttccgcacactcacaggaccaacatcatgtggaagctgccaaggcttgggacttgcaccctctgaagcaatggcctgagctgtaccttgaccccttttggccatagctggagcagctgagatacagttctgcagttccaaggctccacacagtagggggaacctggacctggcccaggaaaccatttttccctcctaggcctccaggtctgtgatgggagggactgtggtgaaggtctctgacatgccctggagactcagctccttattagttatgaaaatttctacagccgcttaaatttctccccagaagatgggtttttctttcctatctcattgtcaggctgcaaattttccaaacttttatgttctcttcctcttgaatactttgccgcttagaaatttcttctgccagattccccaaataatctctctcaagttcaaatttccacagacctctagggcaggggcaaaaagctgccagtctccttgctaaagcacagcaaaagtcacctttgctctagttcccaacaagttcttcttctccatctgagaccaccttagcctggacttcgctgtccatattcctatcagcattttggtcaaagccattcaacaagtctctaggaagttccaaacttgcccacatttttgtatcttctcctgagtcctctaaactgttccaacctctgcctgttactcagttccaaagtcactaccacattttcaggtatccttatagcagcacctcattctactggtaccaatttactgtattagtctgttctcacactgctaataaagacatacccaagacagggtaatttataaaggaaagaggtttaattgactcacagttcagcatggctgaggagacctcaggaaacttacaatcatggtggaaggggaagcaaacttgtccttcttcacgtggtggcaggaaggagaagtgctgagcaaaaggggaaaaagccccttatagaaccatcagatcttgtgagaactcactcactatcatgagaacagcatgagagtaatcaccctcatgattaaattacctcccactgggtccttcatacaataagtggggattaggggaactacaattcaagatgagatttgggtagtaacacagccaaaccatatcacttgccatgcaaacagctgcctacttcctcacccaaggaagacattgctcatcaacacaaatacccctcttctctccatacctggaaggtctagcccagtggttctcaggcttggttgctcattggagtcacctggggaaagttttattttttgttagtgccttgagtattctaatttagaatctctgggagtggtgcccgagcattgatgatttgaatgtgcttcaggtgattcttacatgtagtcattagtcaaaacctcttgttgagcccagtcatgaagcctcagaatccttcttaaaccaggcactaacaattatcagagtttgtatttaagacaattcctaaagcaatccatgacttatgtcggattgatctatgccagcagttctcaaagtgggagaaccacactgggaatttgttaggaatgcaaattctcaggccctaccccagaactagtaaattttaaagtctgggttagaaccagttttatgagccctccagtaggttctgatacacattcaaatttgagaaccacttctccagccagtagctgtgactaatggcctgacattcaaatcacctgaagcatcaccaaaaacctaccaatgcttgggcaccactccgagaaattcgaataaattaaaatattcatggctttaaaaacaagcaaacaaataaactttccccaggtgattccagtaggtaaccaagcttgggaaccactgggctaggccttctgagtaatcaaagaaaatgtgtattggcctagctttcagccggtgttgttgtgcatttacctaggcctggagtggccatctgagtctggggacactgatggtagagtgaggatagaattctccctcaggcaggatgacaaagggcagtgcttcaaggtatgaactgtggccgaggtctgatcaacagcagtgatgaaatgttagaggggccctgtggttaatcgaggggctttgatataaagtgttggagctatccctcactcccaagtcctcttgccccctaatagtagcccgtgatggttctgccacctaggaacttaacagtggtattgttaaactagtatctgataaaattgtatatactcaatgtattagtttctcatggcttctataacaaagtatcacaaactaaacagctttaaacagaaatttattctatcacagttctggaggctgaaagtctgagatcaaggtgttggcagggtcgttctccctttgaaggctctagggaggatctatcctatgcctctctcctagttgccatcaattcttgatataacttggtttgtagatgcatcaccccaatctctgcctccatcttcacatggtattctccctggtgtgttgctgtattttcattcggccttcttataaggatgccagcatgaaatgtagggctcatcctaatccagtatgatgtcattttaacttgattatatttgcaaaggccctgtttccaaagaagatcacattcacaggtctcacagttaggacttcaacatgtcttttgtggggatataactcaatacacaacattcaataatttattgtttaatgataataagaatatattgtgtggtttaaatttctatcgtgttggactttcacaacaacctcaatatactttatgtattataaaccttttggaatagcaggcattacgaaattcagagccatttcatgatacactcggccatgaacctatcacttccaaacttcaaggggatcctctcatgctgcacaacagaaatatttggtgaacaagtccatgaacacaatactcagtattcatgagtggctggatttctgccataatcccattgagattttgtctcacacaagatggtggagaaaagtgctgtagcaatgcccagacacatagaagtgctaccctctgggcttctcaacaataagcaattagcaaaaggaatcagtcatatgcctggactttggcctggaaaacttcatacttgggtgggctctagaaccaaagctatgtgttgtacttctgtaacctcaccgtggcaagacagtgtgctggctggatggtgttagggacatccattgcccattgagagtagggctgaggctcatcattaccatgtccccagcagggtactgaggacagaatgggtgctgcatagatgcttgctgcagactgtctgaagctgagggactaaagtgcctctacaccaagagcttctacctgttggcatcacacctgctggcaggtgtggatgtgggtcagcagatgaccttgaggatgacagggttaggattaattcgctgccagatatcttctcgtagttcaccaaattctacacacacacacacacacacacacacacacacacagacagacacaaaatcttaaatttatcgtatatctgagttaagacataatttttctgaagcagtggttttcaaacatttgaagaattcttggcaacacaactattcaatgcaaagctctgtgtggaaggtgtgtatgaagtcttgaagggaactcagacccctaatgacagtgagctgcctcttcctcttcttctcttctccctcccccatgctccaacagtgacccctgcggcagctctagggaaacccagtccctgcagaaagcagacccatacccttagcatcccccagggaagcaagtcatctggtaccttgtagaaacccctgccagggacagtgctctccccaagcccagtgtcagcacttctgtgtccgtatgaatgcagattcctttccagtgagccccatgcattcttcactgccctgagaatttttccctgatattcctcaccacccaatggagcaagcactcctctatgccccttcctcatacctgcactggggagctgggggctcttagggcactttaaagtcacatggctgtgttggccctggtgtctggtccaagctcctcatgcagcagcagcaggaccgcctggctggcagaaccctgcctgctgcagcagggttccacttccttttcttctgcttccctccacagggctggtcaccatcctctaaattaatagatttcctttcacataattgaagacaagttataatcatcacttgatgatattaattatgtcaataattgatattgatattgattatatcaataatcatcaccatgattacctctgagcaccagaaggcaacattgacaatgatgtttgaaaagatggaaggaaggtttaaaattcctaggaaacaaagtgcccactcttgtgctcccctgactttgcatttccttttgttctgcctcccaagtcagtgtcccccttctcttcagctgagcaggagagcctgccatgacaagctgtcacctgcctgtccaggggctcttctcaaaggctcagccacctgctgggatggaggggggcggcggtgacagcccaagctcagtgttcagtgaggcccaacagtgcaaggtggcaggagggctgtaggctccttgccgtgggccaggcactgccactttccaggcaggagggagcggctccacagctgtcactgacagcccctggggtttgctccagacttggcagaggaggacactctcagactcccaaatcacctctttgaaattcagaagagccacactgtcatctcccctcctctctctgacacaaacacacacaaaagataagcaagccctaactctcttttactcagagacctacactgccaagttttctctgtctcccactctcacacacagattgatacattctcacacacaatctggttctctgtctctgtctctctctctctctcacacacacacacagtatactaattaaactccaattctctcctacctcacttaacccaggtattttgagaaaaccaaagcccctcttttctgggggagcccaggccatctcgaggtgtgacaacagcaccttccctaatggcaacacacaacttggggtctctgcactatcagacattgacctccaggtgtttggtagctgctgcttcactggatgaattcttcacctctcttcccagccgtggggaacatgttgataaaaccagtaaattcattcatgttctgggggatgatgagaacagagagtctggctgcagccacagcctaagcatgccctccaggcatttgtcgtgtagctggcatttgagctgaggacatctcccccaccacaaaagcctgccaccatcctcaggggaaattaggactgtcttctttgcagaaagtgggatgtgtgcctggggaggtccagcctggttgcctttattcctcccaggctccagataggaaaccagataaaaatacactttgctgtttgctccttttttttttctgcctagctcgggttaaccatttttacatttttacagtatttttgctaacgtcaaccatgtatctttggtgacttgagcagattgtaagaatgggcagtataaaaatatcctctttcagtggaggcatgaagtaaatgaggaggggagtgagggagctgccgtccctgctctgtgctgttactgctgcagccagtggcttcatgttccacgtagtatggagagagacagagcctaagcatggaaaaaagcatgaaagggtgaaatcctggcatttggcatgaaaaactgaaaaggggggtcatatttgctatagggagtgatgagcttttgaggacagccttggcaagaaccctgtttaacagctgtaattggcactgatgctggacagcacaggccatgccagctgtctgctctatgctcacctcccattacttctccttcaggaactccctgcttcagccattgtggattgcttgtatgtcccagcctctctcttatccctggccgttgagaaagctgctctctgcctggacttccctcctccagtcactttgcctggttaacttctacttgttctctagggctgagcatagtgaaaataatagttaacactgggctgtgtaggtgctgatgagaaactgaggcacagagaggtaggttacttgcccccgccgcacaggtagaaagaggcagtactggtatccaaacccagacaaaggctccaggagttcttaaccaccaccagaaactgcttctctaacagctcctgcctgccttccctgacccttccctgtgttggggagtctcctctggttttcagaacaccttgtacccactctcatcttcaccttccctcacttttcaatgtttttaacaatatattttaagtttttgttttcttgtctgtctccccactgtcctgttcagcttgagggcagggacactggcttatttctgggacatcagcttctcagcaggacctggcacaaagtggtgcttattgcctatttgttgatgggatggatgaatgagtggatagatgtgaatcccttaggtaaacaaaactggctaaggtctggcagacaagctgagggccaagcagagagccaatttagaaacttccagtgtgggattggaggcaagaaggagaaacaagcctaagagtggccctgtagaaaagagcatctctagactctggaatcttgacctccactgaagggctggcaggacagccagcatgtagaaagaccacagcactgggaccattcaaccctcatgaagctcagggctatctgcatgctacagagttagggaaacctgccccccagaggtggaatgcaacaaaaatggggcagagggcagcatagcatgaccttgtagtggcagggctctccaggaggcatgcttcatcactcttctttccttttgtaccattgcaattccttctgacccaaatgtgttagcttttacattgccagggagcaaagaaaaccataacttgtttctcatgtagccaatctcaggtagttccagtgagttttatgacagttacactctctcctcccacccacctcccctgcagcaacattggaacccacatagagggaaccagggcacatgtggcatatccacatgaggctagaagccagcacaggcatgctggtcaccttgagcttctctaactaggcacagcaacatagcttgtgcacgaagcaagaatagcctgtctgtcataattcacaagatatgggagtgagagtttggaagaatgtgcatgccaagttttttattgcctgccttcaatcagaaacctgattgttgggctgaccacggtttctccttctttcagggagggaagatccctgtgagatggacagctccagaggccatcgcctaccgcaagttcacttcagccagcgacgtttggagctatgggatcgtcatgtgggaagtcatgtcatttggagagagaccctattgggatatgtccaaccaagatgtgagtgtcagcagcacttggtcaccacaaacccccattgaagggatcccaaaggcagtagcataccaattcctcctgttttcagctcacggcctcataatctgaacctgcagtgttcagggtaggggatacagggacacccttagcatggatgttggaactaatcaaagagcccagcatggaggtgtgaaaggccctataaccacaaagcctgtagaggtgccaaggccacagtctccaacccaagagacaatgggctgtttccaaatggctgaggaccatgaatagatcagccccaaattaagcagtaaagtctaccctgcttctaagtgttcaggttctgtgttttccttccctgtgaacgacagaggggaaggaggcactggactgggggccagggcctgggttcccatcctgctctgcctctgacggctatgctccattgagccagtcgcagtttctgtgtgggacttgtacctcttagctttaaagagagtaattggaaagggcccttcttccttgagaattcactcttctatgatcccatatcacctatcagtgaaggaagaggtggaaagctttccaaagctgggcagcttcagatgggccacaggagagggtccctgtctgtggggaggtcaacactcccccaggatgccctcaagggaaaagggtgagaaaggaagagatgggtcatctaacatgctttaaatagaggctttttggaatgttccacatgagaacctttgctccatacttactaaaaggtgaggaagcctttttcggatgatttgctttgataagtctccaatgaaaagtcctgcctgaatttcaacactgcctctcaccctctccagggaccaggcctcttttgtgttttgcatacataccctcccgttggagctgagaggattacaatttgcaaagctgcatacctatgttctctgcttgcccttcccatcactttgggagggggcagtttttatccttcccaactgacagctaaaagagaaagaatggtccccagttcagatctgagtccactggcagccagccacactgtaaccccctctgtgctagggtggacactgaggaacttgtcagctatggagtcagcaagccttctatcctgtgaaaggtttagtgccatggcagctgctcggaagattgagaaaggtggcaacttcccagagagactgtggaaagaggagctggggtacttctatgacagtactccctgttgctatgggcagagtggctccagcctggagtgggtgaaatggctgcaccattaaccgggtcctgaagtcaactatggctggtgtctaggtcctctattatctgggattagcaacaccttgcctctgctcctgaagcacatcaaatcagtaagcggtggagttagtgcaaagcctgcttttatgaaatcagctgcaccctggttctgtctataccagctgctaaataagtataacatgttagtagaaaaagcagacccagcagggcgcagtggctcatgcttgtagtcccagcaccttggaaggtggaggcaggtggattgcttgagaccaggactttgagaccagcatggtcaatgtggtacaactttgtctctgctaaaaatacaaattagccaggtatggtggcacatgcctgtaatctcagctactcgggagactgaggcacgaaaattgcttgagcttggaggcagaggttgcagtgagccaagatcgcgccactgcattccagcctgggtgacagagcgggaccctgtctcaaaaaaaaaaaaaaaaaaaagaaaagaaaagaaaagaaaaatcagacccatcttatcctgcccaagaccttaatctgactaagaacaattcagcacttacagaatgaattacaaaactgtctgacaagcaagatttcacattcaagatattttctgtcaatgctgaaaacaaaatttctgatattagacttccagaattcccaagttattcatttaacacacaatcagtgtatgctagttgtgactaaacactgtgcttgctgattctagaaggttttacagtccggtggcataaacatggggctttgagaacatttgagtggaggaggtaagggaagacttcctggatatttgacgtttgagatgggtctcagagggaataagaacatctgtagagtagcagtttattctaattttgcgtgctccttcaaaataaagcccctaagcattgtctcaagtgcagttttgctcctcgtgggaggcaagaggtgacttcatgcccattcagaaagcttcttacaacctggcctgggagagagccaggaggggctcccagctgccgggctgaagcctcactcatcagaaaccaccaagttggtggtggtaaaggattttacagatgacaattgaaaggttttaaggaagagaattgcagaggcaagttggagtgccggtaattaggcttccagagcacaggaaggtctttgaacatgtacagagagtttgtcagccagagagagcaacttggaagttctgctgcttggatctgattgacagagataatgagagtggcagtgtctgtggagaggagctgcagtcttattgaaacatcagagcttgacttaacccactctgccctggtttctccactgctctgagttcctccacttccctctccccagtgcaaggtcgactaggcactacccacagcctgactcactaatgggaaatacatgtctgggggcagccgggagcaggccctgaaaatacaagggcaacaggaggggctctgcccacttcccagaggcgttctagtcactccacccagtcccagagagcacctggggtcagactacctgcacctgatccctacagaacctgtgtacctaccatttctcagtacaggtgaataaaggcaacccctcaccacacctcctccctgcctctttaattagatcccaggacgtttgcttacactggcctttgcaatggccaaaagagttgttgctgaactttcaaaatgagacagcagagagctctgggtaacagttgcctagactggtctccttgcccccagagctttacttttacttctctctggaaatgccatctgatttcattctaatcttcaatcttctcaatagccacttatctcatcctcttgtggaccaatgaaaggagcccagaattcacttctgttttcaactctgctcagtaggacaccctatgcctccaaccttaggccatatctttccatacaattcaaacctggtcattgtcatttacagccatcatcacatggccagaatgaaggtgcttttccactcctccttcctgttccccatacctgctagtgaggcaagtgtgacagagaatgatttcaaagtcccattagaagaccaaagctattttttgatataatgatattgtaatttgactaaattttattgctcagaaatttagaaaacacgcatatcctaaagaagagaataaaaatctccaaaggcattgtacttcaaagacttgagtggataaatgctactcatataccaatgattgatctcagtatttttttctttgggctgaagggtaaaggacacttttttccctatgtgcaagaagcattaatgctcccagattatcagctcaagtaataacaacaaaattatttacaagaagtaacaaatggagtaaagtcccattttctaaacacaaacatggtagtgggttcccatggctatgctctaccctgaaaagtgagaaaagtccttggtgcttttcaaatactatcttcctggacctccaaaatgagcagtagtaactcccttctttgctgggaagacatctactaaaatagacacagccgtaatgacaccttctgtgtgatgaggattcatcctactactcatctgcgctgtgctcaacacgcatcacttcggtgtcatttaatctttgtaacaatctcatctgtgaagtttcaggaagtcaggtgactctcccaaggttctataggtaataagaaatggaacttggatttgaaaccagccttccaaggtctatgcactatgtagtactatcaccaacacagccaaatggacctgtgttcctagctgacctgcccagaaaggaggaatcagtggctgtttgatgtcctcttaaaaagaaagtaaacacaccaaacaaagagcaaatacaaaaacaaataccagaacagtcttcaaaaaaaaaaaaaaaaaaaaaaatcggcccgtgcctgtaatcccagcactttgggaggccgaggcgggaggatcacggggtcaagagattgagaccatcctggccaacgtgctgaaaccctgtctctactaaaaatacaaaagtttgcagggcataatggtgcatgcctgtagtcccagctactcgggaggctgaggcaggagaattgcttgaacccaggaggtggaggttgcagtgatctgagattgtgccactgcactccagcatgagcaagagagcgagacaccatctcaaaaaaaaaaaaaaaaaaaaaaaagccaatgagatgccatgatgccatgcagtggagacaataagggaaacagaattgagttacattcggtctagagctcacaggcagaagactcagcatgtgcatgggtccccattctcttgatcccttgccaaaagaggttgggtcagctggtcacatcatggagctgcgctctctcagaaaggccctgactccagtgctccttcttgttccaggacaggtggtaaagctgtcttgtcagtgaggaaaattagtatctggggctctagcatctaatgatctgagcagagatgccattagtttaggggaccaccaggaacattaactgccctgcactggaagactttggggacccctggcatcatgagaggttgagtttggactctagctcctcctgctggccctacctaacctgcccttatgcaacccagaaggagctctaggggccattcaatgggtaatcccacttggagattctgtgactgggaccctcaatctagttacttggaaggaactggaaaagggtgcggggtttgtgagccaggctgatgggaatgatgcacagctgctcattctcatagattacttagtttagccccatgcccttgttgcatgccaagaagacagccgacacctccaggggctgttctccaggctgagattactatggcagctcaacagaggcctaggaaatacggcttttgaagtattcaaaacttaaaatcaagcaccgctgtgatttattcccagccctatcttttgctagatgtgtgcccctgggcaaattatttcactgctcatgcctccattttctcatggggaaatggggttaaaatggttgtcctcagaggatagcaggggaatttgattgacaacagtttagaggaggaggagaaaaaagattgtcagtgcaacacagtgttcaaaagtgagtactcccagtcactggatttttaaatatagcgataaaattgatgtggtttgtatgcttgattttcaccctattgaatgaaagaactaatacactttgattatctccaatgacttggttatcattttatctcatgtcctatctcatgtcctacatactatgcatagaaactgtaaaaactaaactaactgaaaatactcactttttgaccaatttataaagtatataaaaaagaaagaataatcagttgaaatgaatctcattattttttaagtagaggcaaaaacaccaaaaacaccctgaactccaaattatttcctttgttgtttaaaatgctttaactgtttattttaatataaaattaatgcaggattattatagaaaataaaaaattcaaacaagcaaagagaaacacatgaaaaatattcaggtttctgcctatccagaggcaactgctattaacaccatgctgtatatccttccaaggtcttttctatgcatgtctataatagttggtttttgttttttacaaagcaagattatactatttctgaagttatgcagccagctcttttacctgttacagtatgagcatatttccatctcaatagatggatttttgtagtattactttaaggcctacattgtattttaggccttctgttgcattatgggtgtaccataataaattcatatgtttagcacttgcgtcacttacaattatttttttaatgtaaaaagcacagtgtaggcataattgatttaaatgcatttgaagttagttaagatgtactggatgaaaaaacacaaagatctgaaaaacagacaatgtacttaacgttcctaaaatctttacaaaattactctctggcgtttgtgaaaattaccaaaatctgattgacggtattcattttggaccaccttgttattttgactgttgtcattgatttgaaccaattatttgtttaaccaagcccattcatgttgctgcctcatgaggaatatggcaaataatgcagaggaggcatctagagggtctctagcatggagtaagtgctccatcaatgctaatccctttcctccctttctcttctcttccaaatgaaagaatgagtccaccacaagttttgaggacatcctttataaatagtgggttcactgggtttcccatgtgtcattgtttcatcactcctagtgccaccagcttccagtaaggcagaattgggccctatgtcttcttaaagagcggagatgctcaagctgttcactggctcattcttcaacaaacatttacagaggtccatgtgtgtcaggccctgcaccaggagctggggacataaagaagtactacaatgtggcccctgctttctaggagcccaatgtctagggggataaaccaagtgcacagaaaatccattacagcggaaggtgtgcaagcacagagcaagggcatctgagacagcctggatcagggaggctccatataaaggggataatttgtgagtgactggctggtggcagtcactcaatcacacctgttccctgtatgtcactgcaggtcatcaatgccatcgagcaggactaccggctgcccccacccatggactgtccagctgctctacaccagctcatgctggactgttggcagaaggaccggaacagccggccccggtttgcggagattgtcaacaccctagataagatgatccggaacccggcaagtctcaagactgtggcaaccatcaccgccgtgtgagtctagtgaaacggtgatccctaaatatggctggtttcatggtcaggggcatagccagcagcctctgaccatgatcatgttcgaattttttaaagagtatctagttgcagtgtgggccttatgttgaggagagcaacatgcatgaagaaagacaggagaacattgcaatgatcatgatagagaaaatagtgtcttaaatcaggataatggttgtggaaaaaagtaaacgagttttggggatttgagagacaaaatctttatgacttggtgaaggattggacatggatattgagggtgagggagatgtcaagatagcacccggatttctggtttggatacctgggtgtctgctttgaaaatgtgccagagaaggtcggcaatgggtctcactgctccattttttttttcaaatagctaaggatgaaactaggaaaaacaatgttaccaatatatctggggaggttgtgataaaatatgcatatttttaaaaggactacgtctttgaatggtgaggctcctaaattttggtttacaaaggagttgggagccttccgttcccttcagactgaacgctatgtcaacctgtctgtctgggttaactgaactgtgacagtgcccagaggcagagacactggccacctggatgtagaagtcatgctgatttaggattccatgaagaagaaaggttcagcccagggctccactataatcctcattccatcagggatgctgccttccatgaagtcagctgtcaggccagactggggcactgtccatgcatctctgcaatgtgtggtcacctgcccatctctgtctcaccaggccttcccagcccctgctcgaccgctccatcccagacttcacggcctttaccaccgtggatgactggctcagcgccatcaaaatggtccagtacagggacagcttcctcactgctggcttcacctccctccagctggtcacccagatgacatcagagtaagtgatgagaatctctctgtccagaccacacctaggggtcagtgctccttccctgctattgcagatggtgtgagtcctatttctggcctcatccctggagctccgtctctgtatagaccaggcctggatggggagcaccttggaaagatgaagggggatgtgagggtgggatggggaggtggagatccactctgggacccaaatgagagttcttcaaagttatagccatatgtcatttgcctaatcacccagagtctcttccccatttaagtttttaaactcaactcatcaaagagagcatccagatggaaagaacacagccatctagtactttaaataacagcaggaaaagcattgcactgattcagcaacagtctgagatatgtggggagcttgtccttatacttagatagcagttgtcaacaagcatgcatttccatcccccacaattatttaccagtctgtggctccctcaggagtttggaggaatacacaaaataaaattattcaaataagacgagagccagaaagagttttaaagatccatgtggtccagcatttcccccaagaatgttctgagaagcaccagttgtgggaaatgttaataggttctccttggaaaaaaggtcccactgtcaaataaatttgggaaatattgtgtactttatcaccctcttggagattcactgctcatattagcattataaaggccatgagaaatcctgaaataaaggaacccatttaaaattattaaataccatagaaccatatttttgaggggcagggttttatagaactgtagtctgggaaatatttatctggttccaccccttccattcagcagattctgaaattacatgacattggtcctcacaggtggcaaagctgggacacaagcctgcttttctggctgccagttcaatattctgctacctgtccaccccagggcctcagtggttcccaggctttgctgcacactggaatcacctgagggcctttaaaaaatattgatgcctggttctcactcccataccttctgattagttgtggtaagatctgagcataagggttttttaaagctcctcaggtgattctaatgtgcagcaaagtttgggaaccactggattaaggttggtaagggtaaaatttcaccttctacactcacagaagctcagataatcctaccttggaaattaactctacccttcaaacacacacacatacacacacaccggggggacttcatgggctccgtgggctacaacatgtaccgatagcacatattgtgggatctggcagcctgtagtacacatttcttatggtagaagattcattcatccatcagtctgcgaacacgtattgatcacctgttatacaatgggcacagtgcaaggtgctgggattccctccttgcagctgggacaaaccggttgctgagtcccaggaaagagcagtagtgatccacccctatagctgagcccccagggacagcttcctgacattccaacagttttcctgccaatattcctggagtccagctctacctctctgaggtctattttttttttttcagaaatgatggagccaccactttctccagggagatggtttgaatgtgtgtctagctttcgatccactgaacatcagaatacatttcttaaaaactagattaatttcctggtgatgccaaaaaaagatggttccttccattaagaatgactgtcaaatagacagcaaaaataaataaatagaaaagaagcacttaccagtgggaaaccagcttcctcatcttttagagtgaaaaattgatgcccctagataatcagagggactgagttcagggatagaaatgggtgtttatgaagactggctactcccattttcccactgtgatttgactgcgtatgggggccattgtcacgtaatcccccaggatctaaaagaattctcttagtctgagaataatcaatgacaaagataaggggaagaccaaaaggaaagtgaaactataaattaagggatttcattcaaagtaaaacatgtccacacactattagagcaatttgatttgtttcttgagaggtaaaagatggaaaaagaaactgagcaacttaataaaatagattgtgggacaatctgtgaattcaaaattcaagcatgcttccctaaagtatttgccaaaaagacatgaacactttgagcatctcaaccagcagcatcccttgggagactgactaccagctgaaaagggcatggtgtgggagagccaaggcattgtggacagagatccagccaagcgttcaccagggtgtgatgtgcagtgtacaaagcaatcagctgtgctgggttcagggggctttagaggaaatacagtcaggaccttggaagagttctgccagcatccctgcatgggtgctgagaaccaacttctcttgtatttgaacactagctccaccactgcttacctactgtgtgaccttgagcacattacttaatttctctgagccctacttgccttgtttataaataatttataaattattataaataataatgcccatctcattagtgtttgtgatgggaggttaatggaatggcacatgcaaagtacttgatccattatctacccatagcatgcacacaaaaaaattgttactgttaaatttttttttctgtccatagcttaattttattttatttttattttttaatattttttatttattttttattattatactttaagttttacggtacatgtgcacattgtgcaggttagttacatatgtatacatgtgccatgctggtgcgctgcacccactaactcgtcatctagcataaggtatatctcccaatgctatccctcccccctccccccaccccaccacagtccccagagtgtgatgttccccttcctgtgtccatgtgatctcattgttcaattcccacctatgagtgagaatatgcggtgtttggttttttgttctcccgatagtttactgagaatgatgatttccaatttcatccatgtccctacaaaggacatgaactcatcattttttatggctgcatagtattccacggtgtatgtgtgccacattttcttaatccagtctatcattgttggacatgtgggttggttccaagtctttgctattgtgaataatgccacaataaacatacgtttgcacgtgtctttatagcagcatgatttatagtcctttgggtatatacccagtaatgggatggctgggtcaaatggtatttccagttctagatccctgaggaatcgccacactgacttccacaatggttgaactagtttacagtcccaccaacagtgtaaaagtgttcctatttctccacatcctctccagcacctgttgtttcctgactttttaatgattgccattctaactggtgtgagatggtatgtcattgtggttttgatttgcatttctctgatggccagtgatggtgagcattttttcatgtgttttttggctgcataaatgtcttcttttgagaagtgtctgttcatgtcctttgcccactttttgatggggttgtttttttcttgtaaatttgtttgagttcattgtagattctggatattagccctttgtcagatgagtaggttgtgaaaattttctcccattttgtaggttgcctgttcactctgatggtagtttcttttgctgtgcagaagctcttgagtttaattagatcccatttgtcaattttggcttttgttgccattgcttttggtgttttagacatgaagtccttgcccatgcctatgtcctcaatggtaatgcctaggttttcttctagggtttttatggttttaggtctaacatttaagtctttaatccatcttgaattaatttttgtataaggtgtaaggaagggatccagtttcagctttctacatatggctagccagttttcccagcaccatttattaaatagggaatcctttccccattgcttgtttttctcaggtttgtgaaagatcagatagtcgtagatatgcggcattatttctgagggctctgttctgttccattgatctatatctctgttttggtaccagtaccatgctgttttggttactgtagccttgtagtatagtttgaagtcaggtagtgtgatgcctccagctttgttcttttggcttaggattgacttggcgatgcgggctcttttttggttccatatgaactttaaagtagttttttccaattctgtgaagaaaggcattggtagcttgatggggatggcattgaatctgtaaattacctggggcagtatggccattttcacaatattgattcttcctacccatgagcatggaatggtcttccatttgtttgtatccttttttatttccttgagcagtggtgtgtagttctccttgaagaggtccttcacatcccttgtaagttggattcctaggtattttattctctttgaagcaattgtgaatgggagttcactcatgatttggctctctgtttgtctgttgttggtgtataagaatgcttgtgatttttgtacattgattttgtatcctgagactttgctgaagttgcttatcagcttaaggagattttgggctgagacaatggggttttctagatatacaatcatgtcatctgcaaacagggacaatttgacttcctcttttcctaattgaataccctttatttccttctcctgcctaattgccctggccacaacttccaacactatgttgaataggagtggtgagagagggcatccctgtcttgtgccagttttcaaagggaatgcttccagtttttgcccattcagtatgatattggctgtgggtttgtcatagatagctcttattattttgaaatacgtcccatcaatacctaatttattgagcgtttttagcatgaagggttgttgaattttgtcaaaggccttttctgcatctattgagataatcatgtggtttttgtctttggctctgtttatatgctggattacatttattgatttgcgtatattgaaccagccttgcatcccaaggatgaagcccacttgatcatggtgaataagctttttgatgtgctgctggattcggtttgccagtattttattgaagattttagcatcaatgttcatcagggatattggtctaaaattctcttttttttgtgtgtgtctctgcctggctttggtatcagaatgatgctggcctcataaaatgagttagggaggattccctctttttctattgattggaatagtttcagaaggaatggtaccaattcctccttgtacctctgatagaattcggctgtgaatccatctggtcctggactctttttggttggtaagctattgattattgccacaatttcagatcctgttattggtctattcagagattcaacttcttcctggtttagtcttgggagagtgcatgtgtcaaggaatttatccatttcttcttgattttctagtttatttgcgtagaggtgtttgtagtattctctgatggtagtttgtatttctgtgggatcggtggtgatatcccctttatcattttttattgtgtctatttgattcctctctctttttttattagtcttgctagcggtctatcaattttgttgatcctttcaaaaaaccagctcctggattcattaattttttgaagggttttttatgtctctatttccttcagttctgctctgattttagttatttcttgccttctgctagcttttgaatgtgtttgctcttgcttttctagttcttttaattgtgatgtttgttagggtgtcaattttggatctttcctgctttctcttgtgggcatttagtgctataaatttccctctacacactgctttgaatgcatcccagagattctggtatgttgtgtctttgtttccgttggtttcaaagaacatctttatttctgcctacatttcgttatgtacccagtagtcattcaggagcaggttgttcagtttccatgtagttgagcggttttgagtgagattcttaatcctgagttctagtttgattgcactgtggtctgagagatagtttgttataatttctgttcttttacatttgctgaggagagctttacttccaagtatgtggtcaattttggaataggtgtggtgtggtgctgaaaaaaagtgtttattctgttgacttggggtggagagttctgtagatgtctattaggtctgcttggtgcagagctgagttcaattcctgggtatccttgttgactttctgtctcattgatctgtctaatgttgacagtggggtgttaaagtctcccattattaatgtgtgggagtctaagtctctttgtaggtcactcaggacttgctttatgaatctgggtgctcctgtattgggtgcatatatatttaggatagttagctcttcttgttgaattgatccctttaccattatgtaatggccttctttgtctcttttgatctttgttggtttaaagtctgttttatcagagactaggattgcaacccctgccttcttttgttttccatttgcttggtagatcttcctccatccttttattttgagcctatgtgtgtctttgcacatgagatgggtttcctgaatacagcacactgatgggtcttgactctttatccaatttgccagtctgtgtcttttaattggagcatttagtccatttacgtttaaagttaatattgttatgtgtgaatttgattctgtcattatgatgttagctggttattttgcttgttagttgatgcagtttcttcctagtctcaatggtctttacattttggcatgattttgcagcagctggtactggttgttcctttccatatttagcgcttccttcaggagctcttgtagggcaggtctggtggtgacaaaatctctcagcatttgcttgtctgtaaagtattttatttctccttcccttatgaagcttagtttggctggatatgaaattctgggttgaaaattcttttctttaagaatgttgaatattggcccccactctcttctgacttgtagggtttctgccgagagatctgctgttagtctgatgggcttccctttgagggtaacccgacctttctctctggctgcccttaacattttttcctgcatttcaactttggtgaatctgacaattatgtcttggagttgctcttctcgaggagtatctttgtggcgttctctgtatttcctgaatctgaacgttggcctgccttgccagattggggaagttctcctggataatatcctgcagcgtgttttccaacttggttccattctccccatcactttcaggtacaccaatcagacgtagatttggtcttttcacatagtcccatatttcttggaggctttgctcatttctttttattcttttttctctaaacttcccttctcgcttcatttcattcatttcatcttccattgctgataccctttcttccagttgattgcattggctcctgaggcttctgcattcttcacgtagttctcgagccttggttttcagctccatcagctcctttaagcacttctctgtattggttattctagttatacattcttctaaatttttttcaaaggtttcaacttctttgcctttggtttgaatgtcctcccgtagctcagagtaatttgatcgtctgaagccttcttctctcaactcgtcaaagtcattctccatccagctttgttccgttgctggtgaggaactgcgttcctttggaggaggagaggcgctctgctttttaaagtttccaccttttctgttctgttttttccccatctttgtggttttatctacttttggtctttgatgatggtgatgtacagatgggtttttggtgtggatgtcctttctgtttgttagttttccttctaacagacaggaccctcagctgcaggtctgttggagtaccctgccatgtgaggtgtcagtgtgcccctgctggggggtgcctcccagttaggttgctgggggggtcaggggtcagggacccacctgaggaggcagtctgcccgttctcagatctccagctgcgtgctgggagaaccactgctctcttcaaagctgtcagacagggacatttaagtctgcagaggttactgctgtctttttgtttgtctgtgccctgcccccagaggtggagcctacagaggcaggcaggcctccttgagctgggctccacccagttcgagcttcccggctgctttgtttacctaagcaagcctgggcaatggtgggcgcccctcccccagcctggctgctgccttgcagtttgatctcagactgctgtgctagcaatcagggagactccgtgggcataggaccctccgagccaggtgtgggatataatctcgtggtgcgccgtgttttaagcctgtcggaaaagtgcagtattcgggtgggagtgacccgattttccaggtgccgtccatcacccttttctttgactaggaaagggaactccctgaccccttgcgcttcccaagtgaggcaatgcctcaccctgcttcggctcgtgcacgcacccactgacctgcacccactgtctggcactccctagtgagatgaacccggtacctcagatggaaatgcagaaatcacccgtcttctgcgtcgctcacgctgggagctgtagactggagctgttcctattcggccatcttggctcctccaatcactgttaattaaatttttatcatcattgtgtttgcagtggtttctctatttttatgaaatgctttcacataggtttaaatgagatagtgtatggcacgtgggatgcattcaagcagtgttatgtattattattaacctaggaagaatgcatgggtctagcacaggtcaactataagccatgaacttgttcttattaatccaattcagtgctctatcctggacatattccttgggttcctgattgggcagatattttagttattttgagcccactcttcttaaaaatgcatacattaaaattcacatggaggcagcaaatggaaactcaggggaaaacatcagaagaccaggtgagccccacatcttttcagtctcagtgggtgatcactaatttaggcagaaaactccacagaataactgaagccccgtatagtgtgcacttggagtgttaaaaaatagcagaggaaaattccagtccatctgagggtcaggagacaatgaaggggctgccttagagcccgtacataaggaacacacccctggaacaaggcacagcactcccaggattgcctaagctggaggaagcattagagaagaaggagaaagtgagcaggaaaatctctaattggaagtttgccaaaaatttgggtaaacttaagctagttggatttttgtagcatggctacttcccaagaacatggctttagtgatgagttttgatctgcgaaaagctaacctaacactaaagtgacttcttttctggctctttcctcctagagacctcctgagaataggcatcaccttggcaggccatcagaagaagatcctgaacagcattcattctatgagggtccagataagtcagtcaccaacggcaatggcatgagaactcttgtttcttggggaaggagaggagggaaaaggaccagggtcaagggggaccagaggttgaccactgtggaatgtactggagagactggcttctcagctgaggaatgcatttccatcagtgaagaatcaaccggacctgttgctagcaggcaatctccatttctcagtgacagaagcatgtttgagatgccgtgggaaaccaaatatataataataaaaatataaaaaggtgatgttcaacagaagtgaagacaaaacaatatgcatcaggagaacaagagtaaacccagctcccattctcagtgggctgcagttgcccaaccacaggaagaaagggaaggaggtagagggaagaaacagaagcagtgttccattttcttcctcaccaatgacattcttttcttttctcctttcgtactcctccctgagagtcccctcccttctcccacactcgtttccctttgctcatgactcctgtagggaagtttcttcaaacaaaacccagctcctgagtctccagatgttgttctgtcagttgccaaaggactttgctgaccactgcatggggatccaaccaattcaattaatgtcttcatattgaagaagagatgtaccttcaattgaaaacctcgtttttcttttgtttgcattttctgcaaaaaggaaaaagaaaccacaaattggggaaaaaaaaagaagaaaaacctgtttccgtgtgcaaaagcacacatatgtatgtctgtgttataaaatgactgtgcttgttcgtaacagatgcaaacaagaaagaagaactgggaagtctttgtccctaggaaatccaaaggggctggaatatggtgttggtttggctttctggttggcccaatcggcctattggctcaatgggaagagaggagagggagaaaaataaaatgaaaggaaaaaaaaaagtttgcaaattcagacaggaaacaggtgagtggtttgaattggatgcagtgtgggccatcctggaatgatactgactgattaattattcctgataacatctcaagaaaaggagaaggaaagtgtttctggagaatgttctttcacatcactggaatctgcaattcaagaagtgacaagggagaattcttgctttacctatggactggcttaagccgtgtggcatccgaggaatgtttcaaatgtgtctgtgtttctctttacattccttgttgtacctcattgttcaattcacttttgtaaattccacctaacatttaattattttaaatttctccttttaccttaatctccttgctaattttatctgtctaattaaaaagagcagaagcatgtctgggtttacgtaaaatggtgtcagagtgtgtatccctggatcccagagggttgtccccaaatttcaggagaatccttaacaactgtccttcttctttctaatgtgggagggagggaacacatccttgaccccatgaatgccaagaagcagaatgtagtaaactctctggcactgacgtgatccaaaggaaaaactgaataaataaggcttaagaagtcgctggcaaataaacataaacaatcaccatgaatacactatcaaccctgattttagtttacgcactgcatttgagaagtccacatccaggccaattttgtaaatgtagactgcttgctgtggtttatctatgaacatgcagttgggagtgaagagatatgaggcagtgaaaggtgttatggttgccaagtagctcatttaatacatgcttacactgataatagccttttcccctagtcattgttaactttgatatggggtggttcttaccttctaaaatcaccggccaagattccccgaacaattaaccccttcaaagtggtccacaagcctgggggtacagcattaattcagtggagctcatcttaaatcaccatccatggctgaacccctggagaatggaagtggatggacagaactcctctcagcaagtttgcctgaggctgcaaaggaccccaatccaaccatgcaggtagaagagaaaatttccctttattaattgcttaccaattccatgcacaatttactaattaccccaaagaccccgatccatgagtatcatacaagtctaggcaatttggctaatctattctcaattttccacaggaatgaattttaatctgtcactaaagtcctctggcagaatctttaaccccgaattctcactaccgcctccaccaatgccaactcatcttctggttgtggacaaagcagggtcaaggtgaaagtcctgttaaaccctttggcttggtttcaccatagatcccagaatggagacagcaagaatccaaagtgcacaagaggaaagcatgaggggtcagcagagccaaggccagggtgcctcgaggcacagttttcagtgaggtgggcacgaccaagatctggacacccccaacccccacagatgccctgcacaaggccccacccctacacccgggatgaactacaggaacacatgaagcatgaagggaaggagatgtgtcactagtgagtgagacctcacacattacctctgcagcactgggccagtcatgaacctctctgagcctcagtttcctcatctgtgtaataggaaaataatacctaccttcaatgaagagtacctaacattcctgagtaggttctctatgccaggcacttatctaactgccttacatgcatgaaatctcttcctcaccataaccttgtgaaatagtagcaggtaatttattgttcccaattttggatgaggaaactgagagacaaaggaccttcccagaaaacacaatggtggagtcaggattttgattcaggcaat

SEQ ID NO: 186 - DNA, 137197 bp, Homo sapiens
  source 1..137197: mol_type = genomic DNA
gtaggagagattgctgcagacagaggtggccttggcaggatctcagtgatgtggccaggctaaggtcatagcagctttcactatattcagcttcctggctatttccttttctggcccatagttaacctccatgtgttaccgtctctcttccaccatctttccctctgccttttgtccccttcatcctaagcctcttgtggctgggacaggcttagcttgccagctttcattgcagatgaagctgccaagctctgtgggacagaagaagatcaaggccctggaacagatgctgctggagcttggtgtgggtgagtgtggggactgggccccatagggtgtacccacccgaggctgtggatataggttgggcagggggaggggagttcacattgctggccctctaccacacctgggctctgcccgtgctgcctgccgcctgcctgcagagctgagcccgacacctacggaggagctggtgcacatgttcaatgagctgcgaagcgacctggtgctgctctacgagctcaagcaggcctgtgccaactgcgagtatgagctgcagatgctgcggcaccgtcatgaggcactggcccgggctggtgtgctagggggccctgccacaccagcatcaggcccaggcccggcctctgctgagccggcagtgactgaacccggacttggtcctgaccccaaggacaccatcattgatgtggtgggcgcacccctcacgcccaattcggtaagagtctggacaggctgggaggcacgcctgggccctgcgagtgagcacatgcacatgggtgtaggggctcctctccctctagtgcctgcagcaggaacgatcatcacttctgtgcgagtctgagactgagggtaggagtgggttgaccagtgggcgtccttgtccctgagcgtgtgaagcacatgcactaagcctgactcaggccttggggggtcactgacctcaatgccttctgtgtatcctcagagaaagcgacgggagtcggcctccagctcatcttccgtgaagaaagccaagaagccgtgagaggccccacggggtgtgggcgacgctgttatgtaaatagagctgctgagttggaccaggctgcttccttttcctttccttcacttctgatgcccctagtgggaagggtgggcaaggaggggattgtcacggccactccacagcgtggcagataggtttgcctgtgttcaggcccttagcagctctctgaccactaaccactaccagtttcacccaaattcctgcacctcagagcacctgtggtttacactcaagatggctttgcacacagcttgtactgatagtcgccgcgcttacacagatgtgtgcatattgagtgagggtgtcacaggtgctgcagtgacggccagtcacacatggatggctttgtgcacagaggcagtctggagcatgctctacctaccttcacatcctgacagctttggcgcagcagcagcctcacacacacagatggctttgcacacacacccagtgcctcgtttccccgactttattcagtggcacgttcacagcggggatgggggtagacacaaggtggggcctgatctgtcctggagccctgggggcaccacacaccatgcactatggatgggagggggcacaggaggggcttggtggccccacagaagcctgtgtaccagggaggaggcggtgagtgcctgggtccccctagcccaggcccgcaatgggaggggctgatactgggctgagattgaggggtggggatggggggcacaaagtgtctgctccagaagggccaagtggccaagcccttgcaagggcacaagcccacgccaagggcatgagcccacagggcagctggggacactctggacacagagctatgccactctccctcttcccctctggtgagggagaggaggattctgggctgggccaaacagctaccctgtcctgccccatcctgtcctcggccaatcagaacggcttcgatgtctgcttgaagatgaagcctcgataggcgagtgtcttcatgatgttggcaatgttcttgcagtcgtctaaaaaggagagaagacatttagatcagccccagatccttcccctccatgcccacaggtgctcttacaagggtgggggtgggaagcagggtcagattcaggagacacaggctttagagagggtggtcccatcccctggtggcagcattcctagcttcaggttggtctgggtgatgctgggccggcaggaagcctggtctcgatgcttctcagttccataattcatgctggaaattggccggcatgtcccgccccagccccagcggtgatgtatgggcgccgtcgcagtaagaaaaaggcagagtaaatgtgtaatttctcccttgacggcccccggccgctgggcgatccttcttgttgctgccgcgtggggacggcccgtccgccacactccgtcttcccgccacccgccttgatgtctccatttcattactgtgcgaccattcatcacacccatggccagggtgactttgccggcactttcgtgtgtgtgggagatgtgacccaggccataatcactagtgacaaggcacaaggcttggcactgctgggccagggccctgggaaacacacctgccctgtgtcctgggcttgtgtgctcaaacagcagcttgcctgggcacctgttcctgtggagctccgacaggatggggagggtccagatttgtggtcctcctcttagccttggccatcagccgtctaccaaaccctcctgtatacatcggcggaagccctgcttctgtcccagtaggctcaaagtgggtgctagtcacctttttgggccctgtttctgcccatacctcatgtggaatgtgtctgcatgtatcagactctatcacaaacagtttctccagtattggatgctttcaactgtcctagaaccctggaggctggaggatcaggcctctggggcctcagcgtcatggacatgggccaggatttgtttcaccaccaccaccaccagcagcaggaggtgcacctgcccagagcttattccactagcagaagcctaggagagaaacagcctgagtgcctgagtttttctgttcagctgcccacagcagccaccaaactcattatcccctcacctgcctcttctcccacctcccttagatgctcctgggccataaccagggcctcagccaccaccaaccttcataggatcgatgctgtgattgtagaaatattgtacatcaatgtcataatcaagtgtgggggggtattaaggtcaaggtggggtcaggaagcctctgcatgtcaaggcccacttttgccaggaccttagtctaggaagggggaccctccagcactagaaaagggcagtaggagggcacagtctctgatcagcccaggccctgtatcactagccagatcctagctctgcagagcctgctttgggcaggcaagtcagacagggtcctgtgtcgcagagatcagcatggacgcacctgcagtggatgtgggcacagagaggtgacaccttcccccagggactcaggaagccatacgggctggtctgaggcagaacagtggaaagacagatgggtgggtagtggcgaccatggcaactccagacgtgacccatccccatggtttatgggccggacacgcaccccgctcagctgaggccccatcatttgtctctcttagtgtgtgtgcctatgctttgggggtagtgggtggaggagggaggggctgtgctaggcagttgacaggaaggggaatgggaccggaaggggcctaagagggggaagggttaggatggggtccatgggctgtggtagtgccaacagagagactatgatagggtgattttcttcccaaataagtctggccctatcagggaacctccaatccttcctgtctccggtaccctagggaccgtggccgctgtgcatattaagaataagtcccctcgttatctgcaattacccagcggccacacacctcatttcttccagcagaaaagaaaattagttttctattgacttcatctggctcctccctcattgctggacaaatcgttcaatttgcttcccctggcccaagtgaatgtcccagccccaacccccaggccaccagccatccagtgggcaagcactgttctcccacctgtgcctggccctgtgctgggagagggtccccacgtcccagtctctgtccttgacctctccccactctacacactggatggcttcatctaaatcgtgagtttcagctacccgctaaagatcacctctccagcctggacagctcataggctctacaccacatattcctgaacatctctttctagataaaccctaaacgtccaatcacgagctaattttctctccaagctgctgcttacccctcaccctgctatgttctccatcccagtgaatggcaccataatccacccaaaatgcccaaagaaatctgagtcatgttgccactttgccctctccctcactctccaaatctaatcaagtatgaacttacgcagattttctcttcttctctgcctaatcatcttggattacaacagctgtcctctttctccctcaaattcattctcttacagccaaactgatctttcttacataaatctgatcatgttcttcttccttaaagcccttcagtggctctccttgccctcagtttaaagtctacaccagtaatatgtcttaaaggctccgcaaaaattgatccctgctatttctggtctctgccatgctcaaccctcaatccctggactccaatctcaaggacccactcactgttttctgaaaatgacaaagtgggttttggagccagaaagacatgtttccaatcttaatttcacccactggctgcataccacacagcaagggcttagcgtctctaatacttaggttcctccactagggtgataatggccttgctgttattgtgaggaccaaacaaggtgttgcacccacatctttgcacatgctgttctttatgcttggaatgcctcctctttctgaagaaaaggcaaggaagctagttttctggaggacctagtggtgagaaagtgtatacaattgatagcacagatgactgataggggccagcagacttagtgaaaccaattggcattcactccaaattctgacttcagatcctgtttactgggtatttctggggtctaacttgttgcaactggcccactacaataaagagagaccagggaaaggaagaaatttgctccagttcacctaacaagtcagtggaatggcagtcatgggcttctagctccaggctctttttccagcccttgaagccttgacaaatatatatatattttgttttttaaagtctatggccctgctagaaagtgaggaagcttggcagaagaagcactagagacagatctggggcttttaataggccaaaaattcagagagagagagcagcagggtgtctggtggcaacacagtctcttggaaagttttctgcttgaagctctgggggccacctgggttagcaggcttgccttccagcacctctcattgagctaaggaggccagcatgaagctgctgtagggtgggagtgaggtggcagggagcacagccttgcacccacaatagaggcctccaagaggcctctacctcaccttcaaattctagaaggctaacctttggttttgtttcattttgtcttgctctgttgcccaggctggagtgcagtggcgtgacctcagctcactgcaacctctgcctccaattcttgtacctcggcctcccaaagggctgggattacaggcatgagccaccatacctggtcaggctaacctgtttttatgtttctgcaggatcatcaatttgtgacaagatgaccctctcctcttcttttttggggcattaatattctcagtgttggaaatatttttatattgccaagaccataatgtgaggagtgcagctgcataaatccctgagagaagattagtggggctagcaccttacaaggaaagacaagcttgttggctgggcccaaggacagtcaaatgtctgcctgacaatctccacacagaagggttgctcagatcacttaggacacccagaaagagctcacaaagggcaaacaacctaaggctgatattctccattagcggtacttacctgggaactgagtggcagtggacaggaagcagggcctgggctagggagaccctcaggaggaaggggacccaagaagttagaagtccattcattcatatactcattcattcagcaaacatgcgctgacaccttctgtatgctcagtgatcttgtaccatatggcttctgagggatgtgcaagactctgtagctccctgccttcaaggaactcaaagacagccctgtcaggtgtgcagtgctatgagaaaaggacgcatggaaaagttatctagttctgtttgaggattaaatattccaaagttaagcagaggtcttaggggatgggggagggagctagcccaccttgttagggctggggtgaggaaggtgttcaataaatagtacaggcacatttatggaggtgaaatgtggagtgtccaaataagtttatcagatgggtggggggatgaagaatcagaagggagtggcaacgagatgaagctggtggtcagtgactgactaaagggaatcctgaagaacctaaatgctaaactaaggagcttaagatgttaatattctgagaatgatggacattgacatgtttaaggaggggaatgacagtaccagatcttgtttcagaattatgatcctagatgtgaggacaggattggaaggattaaccctgaaggcagacagatcaattagcagattgtactatggtccagaccagaaataatggcccagaacaggccagtggcagtggaaatggaggagaagatctattgatgatgtgggggaagtggatggaggtaagagaatttttaggaaatagaacgagcagtccttaatggggggattaggacagcacagggggagcatctaggatctcagtgccactcactgagataaggcataccagggaaggtgcaaatttggatgagttaagtcatattcctatgggacatctaaatttgtcaggcatttctttatggtttctaggctaatgtcttgcttctctatctcagcattattaaacacacacacacacacacacacacacacacacacacaaactatcctatgttttcttctaatactttcagtttttttaatatattaactttttaatctgtctggaatttatttttgtgtgtggtaagaaataaaaactctaacttttttccccctaatagccaattgtcctaccaccattgattgaactgtcaacactttccccacccttttgaaacgacagctctatcacatatacaattcccatacatgtgtctgttggaggcaggagtgaatgtatgtgaaatgatcaaagaagccaatcaaactgggggaacaggagggacagtagggtggcaagctgctgatcttatgggactaagagggagtgtggcctaaaggaacatgcagacacatcctgaggtctgctggagtctccacaggcctcctgcctgcagaatgcttagcttggtaacacactttattactgatcttcaggacatggtgaggaatggggcaagagtccatggaacagggaccagaagaggtagggtagggtagttgggaggtaggtgtggagaacagtgcaaggagaaggaaccatgcatggtaagggtgacacagcaggatccttgggtgtgtccacgttctagaacctcaactgttgccacatctgtctgtccagacatcctggcagcagtaatgccctgagagcaaagtgccagtgcctaggcctgcttgacacaggactgccagattaaatgcagccccaccagctccatacaggacatacttatactatattttttatactaaaaattatttatctgaaattcagatttaactagtgtcctgtattatttgtaaccctgtattatctggcaactctgtgatggggacccaacagctgggtgcagtttaaggtttagcatcaaatgttagcttagaaggaagatgagggccaaggcagtgagtttaggactgacacagcagatggccccagtatatcctgcttctgggtttgaatccaaactccaccacttaataaccatgtgaacttgagcaagttcctgaattttatttaacttatctttgttttggtttcttcttctctaaaatgggaataataataattatagcaataacttccctcaaagtgttgttaaaaagatgagttatttgtgaagtgcttaaaacagtagctcggttagttattatttttgttattccaataacatctaaaaataatgttattccaacaataaattcctgatatccccaccccccagttccttgtctcagacatggcctacacagtcccctgcgcccccattcacggccaccttggcccacccgacccacttcctagacacacactcccttctccccacagccatggctcccatagcttcctacccctcccccagacaggatccttacagcctccactccaaagtgaccccttctttcagcccctcccctcagccccctccaccccaccgaggtgcctggaggtgccacaggctgatggtgaaggatgacgatggttccacaataaggggaaaaggcaatttcatcttgattagcaggcgatttctctcaccgtaataagcgcgctccaaataattagcgtgttttacgtaataatgaaattacagaaatgcagtccacttattcaaacaactcaccattaccatatttttaaatattagacttaattagagtttatcacttcagagaagtatgcggaccgaagatgtttttaaaaaaatcctcataaagtgtttattaagcgctggtaaagctgggataatgatgtgtttggaaattaaggcaatcaaacacttaccgccgctcctggaggccaggcatggaaatgaggccattacacacccattacccgccagctcacagccacttgggggcagtggggtggagggggggatgtgcctggccgggagggcacagtgcctggaaacccctttgccagcatcccagaactgcctgaccagtaagcatagcatcaaaccccttatgtcgcttgcagtgcatttggccaccaggaactcaactcagatttggcgaggcaaaggacatgattggtcccaaatgccaaagatgatacccaagacaaacccttatccagactcccaggcctggcaggacatgtcaacgtcattcaaaccccaatacagaatgaggacagaaaccacgttgggcagccagggaggtccacaagaggaggtggagggtgaatcccacctgctggctccagccactgcagaggaagctacaggcctagaccaggtgaccactcccaagtcttggccacacaggagaaggtagctggagtggtgggagaagctgaggaattgtgctgcgagccaaagaggcagaagagtcaggggccaggctcaagaacagacatggggccagaacctggatcagggaaagcaggcaagaacggtggcagggagagtggctggtggctccaggccccatttatcccagtgaataactaattctagaatttatagtgctgggtttttgttctgtggccatttttatctgcaagggaaggaaatgaagaggcagcacggacaccacatctttctgtgttattgcttgtctgccatttgcaaatcattattaattgtgggccctggtggcaggctgggtgggggccaggctgggtacatccacatagctcttcatcaaggaccccagccgctgccccagagagccaattaccccgccctgattgggatcagataaagagggaatttttacaaattagggaataaatagaatttccacacagggtgcgggcaggacctgagaggctataatgaaaaaccatccgtcaccatcagtgcggcctgggcatgcagccccggcactccctcccttgtgggcccgccctaatgctcaggggcctgggcgtacaggtctgaggacaccccaaacccttccaaggcctggaagcgggagcggagttctcagggggtgcatacacctttgggctgaagatgcttgggccctagctctggcctggccctaatgctgcctcttccttttcctacctctcccttcctcaggctcttgggaaggaggagactgaggcagtcctgagaaagaccagagttggggaccacaggacaaagaccacatccatgtccccacagccatggcaaccctagggcagagccccagccccatggaccactcacgcgactcccattagcactcctccccttgaatcattaaatatgtatatcttattacacgccttgttagagtatcgagctctattgactgatgataaatcctgagcctcgtcctggccataaatttatctggagatgatgaagactcaataatctagtcaggcagataatatcatcgggccttaaaaaagatcattacattatatgtcagaattaaaagtgaaatacgccgtagtaacagggcggctgctctggccattacagaggatgcccgcctcccccagatcaatcccagccaaggccccatccaggtagaggagccaggaagcctcacctttctcctggtctgggatgccacaactagaagtgccaggttatagccagatcacctacagccaagtgaagggaacccagccagggaggggttggctactgagaacagctgagcagatctgccatacctggcagcctcatcagtcttctgggtcctgtagtggattcaataggaaggtgtcagggccttaccctcttccagaatggcctgaactaccaggacagattctttgcaaaatgaggacactgagatacagagaggttatgccacttgcctgtgctgccccgggcagccgcaaagttccaggacctgtgacccggccccagacccacgtgccagcagactatctggagactttcttgtgagcacatgctatcaatccagaccatggccacctccctcccgagagacctgcctgccacaacctctatatcctgaccttttgagaaatcttgttgccagcctcttccttctttgactttagtactaatggccttctccattgtatctaatttccacccattttcacagtaacacagtcaaccttttaaatatcctactactcttcctttgaaatattaaatccaaatatcccttgtttctgacaataacaataacaaggttattatccaaagtgcttggagaccaggagtgttttgaattttgaatttttttcagattgtgcaatatttgcatatacatgagatatcttggggatggggtcccaagtctaaacacagaattcatttatttatgtttcttatacactttatgcacataccctgaaggtaattttatataatcgtttatataattttgtgcataaaacaaagttttgacggcgacccatcacatgaggtcaggtgtggaattttccacttgtggtatcatgctggcagtcaaaaagtttcgaattttggagcattctgcattgggattttcagattatggatgcctaacctgtctgtatactttttttttcactcactgaaaccttaaaatttatacccttactctctccatatatattgtctctcctgtattcacatttttccttgcccacttctttttctttgagttagagccctactctgtcacccaggcaggagtgcagtggtttgctcatagctcaccacagtctcgacctcttggggtcaagcaatcctcctgcatcagcctcccgagcagctgggactacaggtatgccaccatgcctggcttttttttgtgtgtgtacatatggggtcttgctatgttaccaaggctggttcctcctaccccagcctcccaaagtgctgggattatagacatgagccattggtcccggcccttgttcacttctgatgatgtacccaacagccacctgcttctgctctgctggcagagcccactaccccttcaagtaatcagaattaatcctctgtggtctgagtcatttttggtgatcctttctcccttgccagtcattggcacagggatgggcatgtgttctggctactgagacatgagggtaagtttgctgaaaggccttcaaggaaaatttcttatctcttatgaagacaagcatgagggaaaaatagtcctttatattctgctggatgttttcgtaactgcacataatgtctgggactgcagaagccatcttccaaccttgaggggagttagcctatgaagaccatgctgaagatgaaagaaaaatggaaacatatctgggtccctgataacactgctgatatgctgaattaaccgaccttaggatcgccttaccgccaaatttcttttgtgagataataaatccccttatttaagatatttaaaattggggtttatttttcttgcagctgaaagtatactaactgatacagaatgtaaaggcaggaaggagaatgacataaggaatggaccttacaacatagaactcactgaataaaggaggcaggccgaaggacaaagaggacgctgctatttcaggctgggaagttggtaaccgtttttttcttttgctctcttgaaacatttgatcaaattgtttcttgctgtatctcaggacacaggctatgttaggaaaaaggctaaaagaatcaagtttagactaaaaccccagtgaaaacagagagggaagaaatatagctttactaagaaaggcattctatgagtatggcttgcaatataagttgactaaacacccctcagttccacaaaatcatcagactattcagacttcttctttctttctgccctgccattctcggcatgtggtttccaatcctcagactatttcatagtccaaaatagctgctggagctccaaccatcaaatccacattccaggaaaaagaaagggggaagacgggaaaaggcaagaatagcgtatttcccagatgagctgtttccctttaggtatcattcctgcaagtcccagacaacacatttccttttgtttcaccggccagagctcagagacatggctgtacctagctgtctggaaaactaaaaacgtagtcttttaactaggtacacactgattattatacagcggttctataattatacaggggttctatttagtgaaaaagaagggaaaagtcatagtttctgtcctagcaacgtaactgacatgtctgcctttggagcctggattgcatggtccatcatttcagtctttttcttgccaatcctcaactctcttattcccttttccttgtcacccttgcctggaaaaacccagactctgccttctctgtgcctgccacctggagcgtatgactagagaaaatcacaaccatatagactagtgccacttacaaaatcagagtcatcagcctcagctgggtatataaaactgcccagccaatctccagtgttcctgatcagtgtgcactctctctcccttcacccatagtgacaatttcaagtttctctactttccacaaatctcaaatcccctgccctcaacatcaccccaaacccctcacccatgcaaacaatcttatctcctactccacaggagccacacagaagccactctcctgagtttgccccagtcctctcctcctgtcacaagagagggccaagcctgatgtcacgttcttttttttttttttttgagatggagtctcactctgtcgtccaggctggagtgcaatggtacggtctcggctcactgcaacctctgcctcccgggttcaagcgattctcctgccttagcctccagagtagctgggactacaggctcttgccaccacgcccagctaattgcctgatgtcactttctaagcccatccctccactccagctgggtagggtccaacccagaatccaggccttttcagggtccacacattattgagtactcctatttccactgatacagcttcacttttttcttctgcattggttccttcacataagcatgtaaatatattaattctctcccatcttgggagtaaacaagtctccctttaactcccttttccattggctagtacccaatctctcctcccttttagaggcaaacttcagagttgtttacactcaagatcttatttcctcatctcccaccttgcgatctgatcactgctctaccaacactgctttctctaatgatccctatgactcatgaggatgaagcttttcaggttttgattgatagacaattggtgaacaatccactccttgaagctctcttccctaggcttcagtgacccactctcacttttcatgcaattctccttggttcctttgaacactccctttcttttgatcacctcttagatatggatgttgctcagaactgtcattggtctcttcccttctcactctctctccgtgggcaaacttatcccctcctggagctttaattaccatatattttccaataatttctaggagctttaattaccatatatttttcaataatttctaagcccatgttcccattaccaacatcctggtccaggccaccatcatctcccatctaggtaacggcagtgcccctgccaatctttcttccatggtgtccttttaaaccaccaatctggtcatttcactccctgtcttaaaacccgggctgggcgtggtggctcacgctataatcccagcactttgggaggctgaggtgggcaaatcacgaggtcaggatttcgagaccagcctggccaacatggcgaaaccccatctctactaaaaatacaaaaaattagctgggcgtggtggcacctgtaatcccagctactcgggaggctgaggcagaacaatcacttgaaaacaggaggcggaggttgcagtgagccgagatcacatcactgcactctagccggggcaacagaatgagactctgtctcaaaaaacagcaacagcaacaataacaacaacaaacccttcaatgaacctggagcagaaaaagaacattaatggaaacactggtgaaattaaaataaggcttttgagacagggtttctttctgttgcccaggctggagtgcagtggcgtgatctcagctcactgcatctccgcctcccaggttcagccgattcccgtgcctcagcctcccaagtagctgggattacacgcgtgtgccaccatacccggcctaagaggccctttaatgtagcacagtaccaatgttaattttctggtactgataactgtattgtgattatgtaagatgttaacatgagggaaagctgggtaagggatacatagaaactttcctacaaatgtaaaattaattcaaagtaaaaagtttaagagtcaaaaattaaaaccaccaccaccagcaccacttccagtggctcctcactgctctcaggactgctcagctaatccccattaagttcaatattgccaccttgcctgactcagctcccaatgcatccaaacccctttataaaagtctgagttctggacctgtttacatctctggtctcatcagtcccactcccctgttgtacagccaaattcaggctcatttgcaccttgagttttcaagtcctcacttctcacctggctcattgccttcacctctcaggacccaggcttgctagtgcttcctctaggtgccttccccccatcccgcctttgtgttaggaacctcttctgtgtgctcccacagcagccaattctccgcctatcgtaactgcctctccttcacctcctgctagaccatgaactctttgagggcacaggtgttatccacagagacactcaagaaatacatactgaaaagaaggaaggaaggactagaggaaaagaaagaggggcaagatcacacgcaaacctactccagccctgacatttgccacccaaagccttgacatgcccaggccctgaaaccctgtcatggtctttgtctccagcttccaaagccctgaaggtttcaggcccttccccacctccgttcccttctagcatcttggtttccccaggacttcactgtgccaggagactggctaggacctgagctctcatctgtctggccagcctgtcctgcaaacccaggcagtcaagggtggcagtggtggtgctggggcgccccagtcctagccagtgatgccctggagaaaggcctagctatgcctagggactctgggaaggggggatgccctccctaagccgtgtcccacctggtaaatatttcatcctcaagctgctcagctaatccctattaatttcaataccgccgccttgcctggctcagctcccaatgcattatttatcccctttgtttgtttgtcgctaacaggtgggccccagtggaggcactgactggggacaagcccactctatcacagtgtggctgtgaattaatcatgaggactaatgggaaccacctcagctccaggcacttccctagctgcctccccctgccctggcacccaggggtgggccagggccatctcaactcaatttaactcaattcaaacagcacattttatttactatctgcctatacgtgtcagacactgtgctatgctttggggatataagccaaatgaaacagacatttcttgccttcagggaacttacaatctagtgagggagacaggcattaaacaactttcaaacaaataatttcttaattacaactgtgattaaatgctacaaatggggagagcagggtgctgagaaaaagtacacggggaaagggggacttgatcaagtctaggagtcagggaaagcattcctgaggaagcaaactttaagctgagctctgagggatgaggaagagttaattaggttgtggggtggaaatatggggctctgggggaaaataaagccacatgggaaggcaataaggtaaaagaaggtgtggcaggttccaagagatgagggaagggcgtggagtgtggggagcaggaggagagtggcttaaggggggcaggagagggcagcagaggacagaggctgtgagtctgtgcccaagtagacagggactccccctaagctgacaaggctcagagtggggacactcttccgccaaaatgatcaagctgtcctgatgggtcaccatggagccctcctgaacacaggattttcactcaccacctccaaaacatgcactcccactacctctgccaacttgagcaactggtgatttcttgatcttgtgcttgtggccttctaaggctgtccctcgtgctaggcccacctcctccagggactccaggagtcctacttgctcttcttgcccacccttgaggtagtcaagggcattaaccctcaaatgggctggtcaggggactcaggggagcgcctggcccggggacttgtgagaagacctgcgtgagcttctcagcatcctgaaggcttaggtgcttccatggaagaacagggctggatctggcacctcaaccctatggtagaaccaggaacacggctggcaacattgacgtgcctcagccaaaagtgctcacttcacctcccacaaaggagcatctctcacctctgaagccctggtattggcctgggcacccagaagacctcagcaaacattttctgaatgaatgactaaacacagggaaggctccatcatctcccacaatgatctctttcccagacacttcactcagaaacttttctagaaatttaaatagatgaaggagcaaatatgggccaaagattttacagttcttgcttccagtgagcctgacagttagaggccagcatcaaccccattttcaagaggaagaaacatcccatagtgaatgacttacctagtaccactcaaccttgaaggcatgagccttaaactgaatgaggtcagcccagctccaggctccagcatatcaagatatgctccctctgtgggcatttccccaggcaccctagctctctagaacaatcctaaaaggcacctggtttatgaactaggtgcagctctgccagggcagaggcctcactgtgcacatgctcagggtttgtatttctattcaaagtggccactttgaaaatccatacgtctccaggctccctgtacatcatggtgtcaagtcttggagcagaggcatccatcaggggctcccgaaggccacggtctgcatgcccacgtgcctgatcccacccacgtgcctggccttggctcccggcggccggcagcactaccttgtcctgtgcacaggctcactgtagccctagcccgtctgcttggccctcttaccctggccttagactcctctgggtgccctgcctcacccctgccccagaatacctcctcggccctacgcggcctctgctcttctctcttggagccaggcagccagcacggaggcagcctcgataactcgctaacgtgctgcccatgctgttcttaaaaatttatgactgtgcaccatgaaaaatccagctgaggagccatcattagcggtgctgcctccctcccccaccagagccaccctcgtaaattgagatttatggctgcggcaggcggggcgggggcgtgtgcaggcaatgaggatgttgtgggggagacagggagagaccaatgaggcagccgcggggccaggggctcccccctgcggcagctccggtttatcgcaggctgcagtgataatccctgcggagagtaagggccggcctgggtgtcagcgcagggctagatcccgcctagcagtgggacgggacaggtcggggaggggcctaaaccaatcaccggctcctttcggtgtatagggccagatcttgaggtgccaggttccaagcaaaggcctttagggaagaagcatcatcgttgcggagatcacaaggcctggccaccggagtcagcttctcccaccagaagcatctgggttgggctgactgtcctatcccaacccaagagtgacggggaggcaggaaggatgcctgagagcctcctctccccttcctctggtaagatgggcccatggaagggatattcacagcgagagtataggactgaaccccatcacatagcctccccccacagaggccagactggggctgaaaggaaaaggaagtgatcccacagcctgcatctaccctgcaggaggaggggaggaagagtcccctcctcctcctcccctgctcacttagccctgtcagccaggccattatgaaattggggtttcatttacagactaattaaacattacagcttgttcacaattacaacgcggggatgagggagtaactaattacggaagaaatgagctaacatttatctctgctcccaccctccctctccccactgctgccccctcccccccccaatccagcttcctcccactccctggtcactaccaactctctaggcttatttcctagggtgggagactggaaggggcctggtaacccccagccctggacataagatctaactgctattcttagctattctgggagaggggcttaagaactcagggccctgtggcaggggacagtaggtgcttatgtgcaagaccctgtgggtatggcctgtgatggtatgtgtggctatgatatctggtgtgggggtctgctttggggtgtgtgacactgctgtggggctgcaagactctgcattatctccatcttgtggcaaaaggtcttgatgtgactgctgcagatcactgtgtgatgggatatgagtgtgaatgaatcacaccctcaaccctcagccccaggccaggatagaaaagaactaagcggctgcaggaggtgatggttaatgcaggcctgggatatggcccctagagcccagagtccagagcccaaattcctgctgggaggccccattcactctcctgcctcagaagcaagaggggcagggttaccctgccctggggctcagctggcctggccttggcctcttgccagatgttccctctggggcccaaggaacctcctgggggcctggggtgccccctgtgggcaggaatcctggggtctggctggcctgccacagcgtttaataatagtaacagtgagtgtaagcgtttccatccttcctgtctttgggcagaagaaaggaaagaggagggagaggagggagaggagggagtggagggagccggctgaagggaggctttgaggcctcagaactcacatcaaacggcaggatctgggcctaattgtctgacccctgcccctgccttcaatcagctctgcggctccccgcccgccccttgcctaactagcagccatgttctcctcattaggacaagctccccttgcacacgtgtccctggacatgtctccagcactcccagctcccagccctgcctggtgggagggtacagcagggacccagttttggaggggcctctgggacagctataccctcagccaccacagcaggctggcttgggctacaccagcccctccttgagctacatgggcctagaggccgtgtgctgggacacacttctgcgctggctcagctgctgggtacattctgtcctctgtgtgtccttcttgctacagcccaactgtctcagacacacagctcctgagagcagggcctatttgattccagtcccctttggcctggttcagcctggcttgggctggtttagcctagtaggaggtttgagtcagggtctgtgttcacaggctagtagctgaatgaacttctctgcctacggtacaaggatggctctcttaaatggatccaggcgtggtgacatgtcgcgtgtctgcagctggtggaatggaaggaaagcagtactcgtggtggtgaagaactccaaccctagactaggagagatatgttcaaattcctgctctctcacttccttgctgagcagcaatcggtcatgacaaccttctggaccctcagtttcctcacatccagtagagatgacagcccttatcacggggtttgagaattcaatgagagaacagatataaagccctctgtactaatacctggccctcagcaaatgtagaatgacactggtgtgattcagaccagaccaaacaaattcccctctctgcaggccacaggccccactttgcccagtggggcctaggcctggtcagtagtgtccaggatgggaggagctaagaggaagggtccagaaccctgcagaagggtaggggcagccccagggggcacagctaatactgaggacagagcacctatgctggagccaaagcatagggagggatgtcccacagtagctgcaggtggaagggcagggcccagcttaaggaatgtcagttggcattaggtcagatggggtaggtcagcagggctggcccatgaagtgtggattgtcccatgagtactgtgggcctgaaaggaggggctgctgtgaatgccactggagtgaaggctgtctgtgccactctagggattgattctcagggtaccaggaactgggggaggggctggcctggtctgggccctgacattgtctctcaccttaaaccagtggtaatgacttgcaaatattgatgaaaacacaaactacagatattgtgttttcagggagtgaaggtggggagaggggataaggaggaaaataaactgaaatgaagtccggttatctcccatctgtggctgctcctaatcccccagcccacaggaatccaatgcagtcccttatctgccctgtcaatcactcaatcaccgcccagtgcttggtgggcaccgcacgccctcacacacactcaaacacatgctcacacatgcacacacatgcacacacttcactgactcttgctctaacactcccacccacccccagcccattactcctctgagtaggagcagccagcacgcgggtcctgccagatggatgcaatttgcataatatcagcagtggaggctgcaagatcaccaggggtcagggcgctgacatccccgcagagtctatctgcaagtgctaatttggccggcattgatctgtctttctgatttctttgtcatttaagtctgcgatggtttgacaggagatacagagagagacaaggggaggcgaggccggggcctggggctaggaaggtggggaaacaaagattgtacttcctaaagaatcaaacacacataacacatacatacatacatacatacatacatacatacatacatacatacaggagaaccttcttccatccatctgtccatcaactcacccacccatctagtccatcaactcacccatccatctagccattcttccatctatggttgctactgaagaacagtctggtgtctggcaagaaccaattcctcagatgtctctggggctccaagggggtcagctcaggaaggaaggagccagcaccctctccccaggcactatccaggcaggccagtgcagaccctgtcaatgatgggagagttaacccttctcatgaccatccatctccctagcttctcactttcttagggccacaccagaaagaactggatgggagggggcagtagtgtacagtagtactgtgctctgcccttccccacaaggcagctgggctgactcctcccctcccagccctgaaggtggccaaagctgggggaagcaggcaaggtacctctctggaaggacatcaaggtctgtagaggcctcacatcaatgcatcaccactcaggtcatctgaagcccagaagacttcatgaatctcactgattctgaggctctctagttgagccagaaagtcccacatcctatcagatctaaatgctacctcctaaaccctcagccaaggtcctcacattcttccttgccttgagtgggggtcccccacaggaatggggacactgccaggctagatgtcatggagaaaggggatgggaggagaagactgcagctctgggaagcaagaaccctctgcagagaggtggacacggtcactctgtcaagggatgcagaggggcttgaggcttcccagaggtgcaaggccccctcccccaggccacagtggctctatcttggtaccaccccctttccttgcctatggtagcaggaatagggtgatcagaaggaactccctgctgggcaagacgggggctggcgtttggtgtgtgctaatcctgggcccgaggtcttcagagggacccgggaaacttcaaggagggaaggcaaagctgtactgcagacgagctcattagccagcaccccccgcacccccctcaacgaggaggagggcgggcagcccagtgagcgtggcggcagaggcggcagagaaaaggctgtcactgtcctttcttccttttggtacaagcgtctccctgagccgacgattctcccgcagtgacacctctcatgggcactaatgagatctgtgtcacagagctaatgcgttctgactggactcttgatagacaccccactccttcaggggagaccacaggccagcccactgcccccctggggcccaggcccccaccctgccacctgccagcccagctctcttgccaaacagttctgggtagcaagctcttgagagtccacttggtttctggccatgccacctgtaccacaagcctcagtgggatccttctccatcccagagcagaggggacaagctcctaggcaggaccacccagccgggcatcagggaaggttccagttactctcctagccagctgaaaccagcagtagtctgtgaggcctccaagttacaatagcaggtgagattttactgacatttcctgtgcagatttccaaaaaagaagggaaggaggtccaggccctgcccttagagaacccaagtgcgtagggccagatcattacctctgacaaattataatagggcccaagtgtgtgttttgaacactcatactgggagggccaggcgagactcccagaggaggtggcccctggaagattagcagaactttcctgggccatgaggtagagaactgaaatcacaaagaaccgtcagggccagaaggaggtcagatgccaacaattgcaggtccctggctcagggtgactgtagcagcagagagggagtggtgatgctgcctttgctttcttcctcagctgctgctaccgaaggtctgttcaggcctgcgtgtttcacttgacgctgagggaaatgagggaagcgagcttgttttcttccacatcgtctctattggtagcgcaaagcccaacaccaaaagggtgcttcatagttccacagtgataacaacacaggctctgcactcagatgggcttgggtttgaatcctggctcctcaaccaactggctatgtgaccttaggcagttcacttcactgagactcagtttcttcatctataaaatgggaatgatgatgcctgccttcattaagactgttgtgaaaactaaattagttaacataaagtgcttccaaataatatgagtgcttactgcccctttgctgaaatgaatgaaggaccactcagcagtcccctgtggaggctgccctccctcagagcctgtggtccaaactaaggatgctgacagagaccatcggcagccctggagtcagcagttctagatgcatgcaggccctactcaccacaacctgctctggcaccatgctgttcaccagtctcccaaggccaaatccgctaccccaggaggaagtgccctcccctgactatgatgtcacgctgacaagcctccagcagcctttctgtccagtgctgcatcacctccagaccctccttggccatccctaaacctgacttcaccctcagtccccagggccaagcccacaactccatttgtgagctctgtggtgacagagcactgtgtctgccattgttaccaatacatttctagcacctaccatggttcctgatatatggtaggtccaaggtagtgtgtactgaatgaaagaaagttttacctggtgtcctacctctatttccagggccgatgcactcttgcttaccttgctgcccctccccttcagcctccttgtctgcagtctctcctcactagtccttcccctacaaactatgagcatcctctgactgaagccaacactgaccatgtaactcccctgcccaaaacactcctacagctttcccacgcacaaccatcctagtagccccctcccctacagcctgagccccttccccacacccgtcaccccaagtctgcctccgtgttctctcagcacctccacaccacccatgccacacccctgtggcactgcaggaggactgagcagaccctggacatggctcagctgtgggatctgcagcacccttgcctggaagccacccaatgctgccttacccccccagccaatacacataccactccccactccaggctggcagctcctcacacagttaattagcaccatgtcactaaggaccagcctgagtggccagtgacaggagctgacctctgacccccagggctgggaagcagtccacgtcaaactcttacagcgcgacccttttagcacgcacagtaactcggggcatcgccagctgaagctcattaaagctgtctctttggtgcgagggccattaacctcactgctcaaaacccacgcctccccttccccgcctctcccagcccaattaatgccctgcatcctccctcccttccaagcaccctcacccacacctcagagccagcctggaggtggcagggcagccctcttcattcaaagactacaaagaccaagtgtcaagaagcccagtgtcctggggagccgctggtgctggcaacagagtagggagccccttcagccccatggtgtgctcagcactgcatgaacactttccccaggggactcactgagccttcccaataacccagagaagcaggtggcattgtccttcatctaaggtcacagggttctgggtggaagaaccagaactacttctggctccaaagcccttactccattgtcactcagagccttgggctgccccatagggcccagccagataaagaaaccttctctgaaaaaggaagggacacctcacaggtcctaacctagggtcaacaggtgaacagataacaggggcattgctgagtctcaagaagcacaaagagtgggaacgaggaaccccttctcacacacacaccctgggatagatgatagaaggggcacccagataaagtatatgtggggtgcattaacccaggctgtccctagcccccagccagttcttccttccctggaccaatgcaagtcttctcactggtcctctttggttcctccctttcccatcactctttcattgattcatttactcacctactcattcattcaaccacccatatgcatttattgagcacctactaagaactagttttgtgcaacacaaactgcctcattgattctgaatcagggctttgatcacgtcattctctcactcacaaacctcctatgtctcctcaaaactgcaggaaaagtccacaccctttaaccaggcattcaaggcctgcttatatctctgtttattttctagctgcttcctaacccaaatttgccactctagtcatgggaagcttcttgtaggtgtctgaacttgtcctcaacacactgggtttctcatgcccacaggcctttctactgagtcctcctatctaaaatacccttcccccatttttctgcccagcaaactcctattcatctttcaaagatcccaattcaagtgtcctcttctctaggaaacttcctgctgacctcccaggcatattacactgctgggtttggcgtcttctctagattgtttggaaaacatctgtgaaacatctatgcgagggaacagcagttatggtggagcacccccacttccccaggcctgttggtcacttcctcttagcctgagccctgggaaacccttcagatgtcccaacaagaatatgggggcatccctcctggggtgagatgcccccatatcactacctcttagtgagaggtaactgaaaaagtagaagctacttggcaactgaggagagggaaaaccacctttggggcaacccaggtgttttctgtcacagcccttagtaccctgggtggcaagcacctatttcagtccctgtctcttcccaggatgtgagctcactgagaacagaaacttctacttagcatgcccagcatccacaaggtaccagtgaatgtctggaatggataaaggatctactctgaaggaggtgactgggtcctttggtcctggtattctctctccagtccccccccacaatgatgcgaccccaaaggctcacaggttgtggtaatgtcagcacactgcccagagatactctggctcctccccacttggaacaaggcctatgcttggtcaggtgcctcacctgagagcatctgcatgcacacatgtgcatatgcaaacaaaataagatatacagaactgaacagacacacctgacagatacacacacagattggtagctgcttccacacagactcatgccctcagaaaaatacagatatactgttacacgctccccaacagacatgtataatcatggatacattatactctgagtctgacacagagacatacagctaaaggtgtcacacatatgcagacacacagatacagacagataacatattcatactgatagatcagaaactaacaaaacctccaactgcctggaatcatagccactccagtttccttccaaacaagaatccccttgagggtatacccccatttggtaccccaagtggaccccctcaacccaggcaccgctcaatggaggctgctgctcctgcgggggagtcaataccctgtggacggagtcatcggtcagaaggaccccgactaattaaaagctggtgaggtttaaataattcatctccttaactcccattgatcgtccagtttagtggccacagacttcaaacaatattaaacagcctcctccagctccatggggggtgggtaagctgacatgtccccacccactgaggacattgcccactagagatgcagccagtgaaggaggaccttggcctgagtccaaggccatctgtgactcacccaaagcccagaccccagcctcctccaaaataccactttgagtggtgccttccagtggtcccattcagtaattttctcatgccaccccccttccaccatccccccacctatgtagagagccctgttggggcactgaatgagccatggaaactctctatgtgcctggggactggggcacgcgggcaagggacgatggatggagctgccgggggaatatgcgaagggactgaccaatgccgctgtggggccggcctatgtgttgcaggctgaggcccttgttcatgtctagaagtccattcttgggccagcagcccatggcgaagctgtaagcctggaagacaggaggcaagtggttaacggaggccctgaccctctgaaccaaccccactcacaaggtcttccccccaccccccaaatctttccaacaaggaatccctctcataatgccatctcgtgagagtcccttctccacccaggtcctccccagacccagcagaaactcccttccttctccagagtgccttttctcctgggcttctccccatctgagtccctggccctcaatgggtgcccctcaccaggactcctctctaaggagttcccgttcactaggctcctccttctcaggagccctcctctcacaagggcatacctgcaccttgcacccctccttaggatctcccctttccggagcccccagcactttgctgggcctcctcctcacagtattactgttcacaaagactagcttcaggcaggaccttggaaaccagtgcatccaaactgcactccacagacagaaatgttgaagtgagagctggccagcaaggtgccatggtcaaggtgcttttgaccacaagcaggccaggctatgaaaggatctgggagctttgtggtggctcaactgaggagaggagtaaggtcacttggtcaactcaagcagctgggaggggtgtacatggggcgtgtgtgtgtatgtatgtgtgtgagagagagtgtgtgtgtgtgtgtgtgtgtgtggtagggggagcagatgctctgctgaaggtcaagtgctcacttatgcatattcaaagcggccacccatcgatctgtacttaattgttttcctggggttggggaaggaagtgctgggggcatcgatctgctcaggccccagcactccattgccccccctccatccccttccctcaccacctggctgccagcaacctccacctgggggggggacacacggcagctcaggggcagcgccttcccttacagtcccttttagccatgactgacctgatgccacagatgaggaaactgaggcccagaaagaagagacttaacataggttagatcactatgaagtagccaaataggattgaattcctgctcagcctgttaaccaaatcctgggcttctccgggtaggcctggtagctagtcgggccttcaaacattacccatcccctcactttagaagtccccaaacaccaggctgcccttctaccagtggcaggacagcgtacagggcagtggtcagaatgaagcttgggtgagtttccagaagttggataggtggtccagtgatggaaccaaagtgactgccagctgtgagtagatgagcaccgcagtggtccagccctttgctagtcccaggaggtctccatcccactaacacacaggggagagggcccagcacagggtcagaaacacaaaatgggaggctgcacacagtgtctgtgccagggcccagggcccagattctgtgtccacccttcctttccagctgcaggaaccaacactccagccccatgggtactaggaggctaggagaaagtgtacttaaaccttagcaccctctaaagccattctccttgaccgcagaggtaccagccacagcccaacttcccagccagccttcccccaccctttcccaggccacagctgaacccacaaatcaggggctgagtgtgaggctcaaggacaggggagaagatgctggcccagagccagggcagagctgggatggaggcagtgagggaagcagccagtgggtggtgcatagccagaggagccgctgagcctggtcagggctgaggctggagcgcagtgggccagagagcagtggcggctgcctttcaagtactttaaaatcacttacaaaggccggattaaacgatcagaaattccatttaataggacaaataaagaaataacaatctactctatcagcctggagaagacgagctggatgggtttttttcccctctaaaaaggaaaaagggaaggaagggggaaaaaagaaggataatgtgtgtttactcaagcaaagaaaaaaatatttaagtgatgtcggggagaagattgcagtaactagtgaagaataacatcgtctactttgctgtcaaatcacacccgaatttcagtaatagattctcggctgacactcaattcaattcgaaggtgatcctgctttatcccagcccatcaaatattaaacacttgcattagcaggtgctgccgcttcccagcttaaagcgacgggcgggcggcagggctgccgaggcccctccgctctgcttatggctcggggacagggcagctcaacgttatctgcacgtcatcctgagtcttatcgcagctaagcgggaagaccacttcagataacattagatgcttgccccaccgcgtcaccgtgattagattattattgtaattatgactccccaagatcttccacagactgggacgtgtgaaagggggacggaggacagcagagccccaggagggccaggctggaccagggaaagctgggcccttggcaggaaagcgaaggtgccaggaaaggaggcaacccggtcccgcctgacagatgcctttcaggaagggcagtctggcttgtcagagcgagggcgagatgaattggcgtctccactgcggccgtgggtgtcatgccgcacagtttcatattcccagataaggcgtgataaccaattgctgctgtgacatggcctcatccagcacttcctcagggggggcatggggcgggagagggggtggcgcatgcacatgggtctgccaagctcctaataagagggatttaatttttacaaatgctgcttccagcgggaccttcacataccagccaaagtccaaaatgatattaaaaacggttaattaaaactgctctccctcagcctgggctctcccgctgttggccctgctgagagccctggcacgtcttccccaggtactgacacatgcacctgcagagcctaaccttcagatgtgaccaccagcctcacggggccaccctaagcatagtaccagggcccagcacctcatgctccccccagctcctgccatcttgggtactgcttaggcacagccaacagacgcagatagctgcccacaaaacataggtggtcccacagcaacctgtgctcctgccaacatatggtctgccaacatatggtctggatcctcacacctgctaccccgctgcacctgtagtcatctgtgcccaccactcacttttaaagcccatgcctctccccacaagatatgcaggccatggagtggcccaagcgcatatatgctggcatgccacaaatgcatcggacttgccctcaggtgactgccacacttccattacttgctccctccattcgccctccttaagagattggatctgtctacaaatctcagcagagaccttcctgggagtcctgatcagggtgaggtgtcatgggctatgtctcagagattccggctgaggagccacggctggcactcagagacccatcagagcaggaggatcagcaaggctgagccctttggattgcctacaggggacaatgaagacaagcagaccctggtgagattggaggaggctaggaaagcttcctggagggagtggtactggcaggctgggacggtttgacaggtggcaggggagtacaacattccagacagaaggcacagcaaagacaaaggaaagtggcatgagcaagcacaataaaggcttgggtgtggctgggacagccaaattagagaggggagccacatctgaaggcactgtctctcaactctgtgtacctggcagcaacatggcatcaaggggccttgtgtctatctctttactcctgcctgctccctctcactgctcccttccctctcctgccagcttgggggaatggggatatggggcccagaagctttctgatcttgatcagtgtggggcaggaatctgctttaagagctctctccaagagcttgtgcccgagcctgtttcccaaagctgcttccaaatcctctgggtgccacttctttggctgcatctctctcagccatcagggtccacctgcccagctatgcacagtcagcacctagcccctggggttcccagacagagggtggggcaggtaggaagatgactgaggtgctcctgagtcctgtccagggcaggtactgatgcgagccacagggacaggtggagctggctgaggtgaaagatgctgggcctaccaagccaaaccacctcagccctgtgccaggcaggcacgcacacacgcttcccttcccctgggctgctgcaatttccatgcacagggaagcaggtgccgagctgctcccggctggctctcccctctcgtggctctgcccgccttggctgctgccccattagcttagtggccagccatctgcgacgggcctgccgcatagccctgctgtaggtgcggcgggtggccccctgtgtaacagggagctttgccattagcgcctttaatattctgacacctcagcgcagcctgctattacatgcaaacactgatcgccctgtgaaattacattgctgggcccgcgaaatggaatcgtgtataatcagcctcctccatgcactgtcagtcccatcacaaacacggcgcccggcggcttatgggggcttagcagctgcgacaagtgtattgggtttaatagatgaagtagccctcatcggctgcagcatcagatccttcaaagaggaaagaggcctcagcagctgctatggtatctctgcccacccatatactacctaccaggaccctcagagtggagtggacgcacagtgggaagggctgtggttgggctaaatggctagaacccagctcaggctgcagacagaataggctgctctgcaactttcagaaaaaccagagttttgaagcctgtgctagcacattcagcctatccatcccacctagaggtgaggaggagcaggcctttaaccatacctctggatgacttgtcaccctgcaggtgattgctcaagactaggagccaaatcaaaccaactgccattcccctaacccccaacagagatgaagctgtgatggtgatactccagaggatagggaagagaaagtctggcagacacaaatactacctaactctctatcctgaccaacacttccacagctggtgagccaaatacctaagggcacaggtaaacactaggctggagtatgccacatatacttatggcacacccagcagcccatgcctcatagaaaggctcagttctgccagctattagcactataactttggatgagttattaaacctctctgagcctcagtttcttgtactgcgagatgggatgacagtactttcctccaggtatatctgagatcacccaggactactcactcccactgctacctccagatattcttggtgccattgctcaaaatgcaccttgcctttgagaatacagttccctctccctttcccagggaacccttttccaggttcagcctaataccagttgtggcagagtgtattttcctgtgatgggttgcaacactatctcccatctcacatgttcttctttcactgtgactctgacatacctaccatcaagactaagtctctgtcaccatccctgcccttcaacactactgcaaaaatgcttaggcagcttccacctcaatcactggaaagtttccctgcagtccggggctgctgtgttaagtagtgagactgcctgaaggtagccatgccatgaggaagcccaaactaacccatgcagagagaacacagatagaagccatgagactcggtgaagaaagagagaggcccagccagcccgcaactgctctgaccattgtgccagctccagccactgcctgactatataaccacacaagagatcctgagccagaaccacattacctatcccctcctgaattcctcagtcacagaaaccatgagggataatacaatatttgttgttattttaagtcactaagtgtcagggtgatcagttatgcagcaacactaactggcaagccaatacctaactcactcctggatatactctgcagatgtcttcaaattctttcctgctgcttctagactattcttcctctccctctgggacttcattccaaatcatcatcactctgggtaacttcagtatctacaagataacccagccatggacgttgcctctcaatttcttgactccctgtgctctaatgagcttctcctctacctatttcagtcatctttccccagagccaccccctgagccttgttatcacccagaactgccctctctctgaaatctcacaaggacgaattccactctggccccagcctcctaaccttctagcttttgtttgctttctccctctgctcttgcttcctcccagcccccgcctacccctagtctgtctatccccttttcgggcttcagtacttttctactaagcctgaacccttgaatctatcacttcaaccacccatcccccaatttttaacaccctgcctacttgtcctagagcacaccttttctggaaaaccccaaccatgactccatttctccacacttgctcttgagctcaacaatgccagaaaaagtcattcttatatacagaaagtggttactacagatccaagaccacagccttagcaaccctcaatggtactcaccaaccctaatgccttcctacttccagaaagataataaagccactaggcagagctctttctgcatgccccttatctacaaatgcatctgcatccttccccacctgctccttcacctcccctgttctaacaggggagacactacgcttcttgtctaaggccaacaccgtacttgtgctttacaggccatcctttccccacctcctcaggcccttgctccatctagtatttcttgtctttctaaatccttaacctcctcttctctgctggcttcttcattaacattcaagcatatgcttagatttctatcactttcacataacttctctgtgtcttggtttcctctttgtaaaatgggggttataatagtttctaccccatagaattgatgtgaggattaaatgaggattactgtctgtaaagtgcttaaaacactgcctggctctctgaaacctatgttaagttttagattatttttaaagttctatatgcatttcacatcctatccagctactgctgttctcctgttaacgaccaacttctcaagactgcctccactcccttcctccttcactccttcactccctgcagtctggtcaagctgccgccatgctgccccacatctgtggacagtttcagattcttacctgccttcgccattttgcagcctgctccatctctgaaacccttctcccttcttgacactctactcagttttcctagctctctgccattttccccacaatctcctgtatagtctcctctgcatttggtcatcgtatctgtgtactcacccactctgcactctctcttcctatttttttctacatgctaccactctccttgggttccttgggtgatttcctcaagtccattgtcttcaacctttctaatttccaaatctgtatttcttacccctacttgagtgtcagacatatatattctattgcctacctcgaatcaccccctggatttcacacagacgcttcattctccatatgtttaaagctcatttcaacatctcctcttcaaactgcttcttctcctgggctcccaaattgcagtgaaagctattaccatctacctggtctaccaggccagaaatgtgggagtcaatcttgattccttcctcttccttactgcccaccaagtcctgggattgctgtttcatgccttcaagcctttgatgaagcagttccttcagcctgcctagaacgccctctgccttctcccacattttgtcctaatttgaacacacactcctctttcaacattcaattcaaaaagtaccttcctttatagtctttcctggctcatccctcctttaaatcccccatactgtgaatggcacctgtaacatggattttgtctcccattatgctgagaggttcctgagggggttggggggttgtatttgctgtctctgagtggtctccactgagaaaaggagaagcgagaggagaaggggagaggaagaaaagacacctctttgggtataattctaccaagcctggaggcctggtttccggagctgctactcctgccaatcctacccagtctccttcaggaaccatagctgttcttgcccagcagaacagcaacagcccaccccacagccattcttggaactgggggctcagttgcctgttttaaggaagagggaactgttgctgtctcctccttttctgtactctcagcctatgtatatcccccaacccattcctcgggtccagcagaggcttgacccgcacagctaaagcagcaaagggatggacacttgcatcaggtgacacaagcccatcctccctaaccccagatggcagttctgttgtgtgtacagtgttctccggctaccaacatacttcaggggccccagagctgctgctgcctctcttcatcaacggaacctgagtgggataattatcgtctctgtgtacttaaccttactgctcactgcctccaacatgatggctgcctctagtgcactgggccaccactacagcaaaggcaggggctatgccacaggtctaagtcccacagcatttggtactgggggtcccaggagtggaagacagctaccagctcagtttgatcccaagtattatggtcccgagtattttcaggtggagttttctctttcttgctctcagatttcttggcttcaccgctgagtcagaggggccttggggacagtgaagtttctgggttgagaataagataagtagctcctgagccatgctgcctcagtccctgcagaagagggtggcctgtctggggctccacgtgcactgtcacagagtctaaggcagcaggtcagtctgagccagctgcccagggtgagagctacattgtgagttttctttgttttcattacaatttcctctcccaccgcttctttttagccagccctttcctccccggggtgctggggattgaatgaaacaccacccccggctccaataagtgtatttcaattacatctgtcactgcataacgatataatgatatatcatgtgatattaaatccatggtaatcatatcagggattttttttaatcgtgcactaatcgcattattacatctctataattaacaacaggaggtatggaaattcagttaaggcagttggctcaatgtactccccccaacccacccccatcctagctcccccagatcaggacccgatcaggagacagggactgcagggcacttgccagctgggccaaagccccactcccagtgcctcagtcatgggcagagctttccacatccagggctggcagagacagtccagggtgctggtccatcttgtggttcctcaggaaagaagcctgggggcagaagccaaacagagaggcccaactacagggcttagctggggccttccagacttcccaccactgctgcaccaaatcatctccatggggagggatgtcaccttttctttcagcaaggccctcaaaggtgcttgtaaggcacaggggtgagtttctccctcatggcctcctgcgccagaattccctctgctactgctacacatacaccctccctctaacccagccctctgacagctcctaacagcaccaggtccagcagctgtgatgtctctgcctcttggtcctatcatccctggtgatagctgaccaaacccaactccctggggccattcctccccaatcctctcgcagaagctggcccttcatatcatataacaagtgagttttgataaccactgggatgttcctccatttccccaaaacagtctaagttcttatgttctcccacccaggcctagatggagagaggaggggctagggactgcagcttgaactatgtcaaatgaccctgtctctcccaccccccttcctgatactgagctgttagggctaatcccctcaggggtgtcagaaccagtctgcaaagcagaattctgtgtttcaagcccaaagctttgaacctggcatgtaactagtcctcagtaaggggcaggcattttgctaagtttgactctcagaagttggacaggcctgaagataaaagagaaaaatcatgtcctttttcctaataaaaaggagacactaatagcagtcagcacttaggcaaagcactttaagtttctaaagtgctttccaaattaaaatataatcctttattgagcatgcggcactaccgccaccaccacccacccagccacccctcacatacaaaggtatatgcatgcttgcacacagcatacacgccttcactttctttccccctgggaaaaagaagaagggtgttcaaaacattcatcccagatccccctccctcttcattagattgttcatgtaacacccatttattgaggaactaccatgtgccaagccctgtgctgggtgctagagatacacaggtcaagcagaccaagccactgccctcaaggagctcccaggctagaaggagagacatgtaaacatatttgcaaaacaacactgaaggaaatcagcaagaaggacccacacggccttcagtgggccataggtggggcacccagggaaggtgtaggctaggagctcagaccagtggtctgagctgagacagaatcctaagaagcagatgagtggtacaagaaactaagagtagataagatcacccaggaagaaagtaaaaacctttagaatcagatgaagcccttctcttctctgatgtttggagggaaaaaaaggatgagaaggttgaaattccagcctccagagctaaggcccaaagaaccttctctttggggtgcacccaacatcctggctcctgtatcttccttggtcaaatcagtcttcactctactgtaatatgatggagagtgcacgctttggaatcacactgactcattcacaacaaacatttactgagagcctattacatgccaggctatatgcacatatatagcaacagagcacaacactgtcctcagagagcttccacagctttctccaagagacttaagctcaaaggaactgtaataaaggttccaacaagacacataagcttttataataggagagaaaaggggagtctgacttaggtggggaatgcttccctgagaacaggtaagtagaagctggctggctgcctggctgcctggctgactgattggaggtggggtgggggaagggcagaggtggggtgactgggggcatgctaaggcctggaaggaatcaaatcaacgccagagtccctgagcacagaaaatcaagcatgaaatgtggctgatgaggaaggcaggagatgcagcccatgcaggacctcaaaggacacggtaagggctttgtactgtttcctaaggccattcaggggccctccactaccacgctatgtgatcttggggtgctctaccaatatgaaaaggtagttccagccaggcacagtggctcatgcctataatcccagcactgtgggaggctgagtggggaggactaattgaacccaggagttcgagaccagcctaggcaacgtggcaaaatcctatctctacaaaacacacagacacacacacacacacacacacacacacacacacaaattagccaggcatggtgacgtgcacctgtgatcctagttactagggaggctaaggtgagtgggagaatcccttaagcccagggggttgaggctgcagtgagctgtatttgtgccactgaactccagcctgagtgacagaggaaaaccctctagatagatagatagatagatagatagatagatagatagatagatagacagacagacagacagacagacagacagtagttcctttgcacatctacccctccttattcctaagggtagccaggcctgggaaaaactaatagagaaccaagataatagatccttctagattttccatctagaaggagaggaagaaagtacacaagcattcattcactgaatattcacacattcactgaaggcctgccagaacccagcaactcaaacagaatcacatgtagacctgcgctcaaagaactcatagtcctttgacgggaaacagacacagaaaccagtaatggcccataactgtgatacagtgagtggagagacccacagtagggattgagaggagggaagttctcaggaccagtggcctctggagcccagaatggtgtgtgttgcttctgatcctgcctcactgcacaggcagcaattggttggctgggacagcatgacccacacagactgcggattgagcaggggcaggagtgtgaggaggaccctaaagccaagcctcctgggaaggggctggagaccaagtagcagtgaacctaagcctggaccttctggttacaaagatgaaggttgaaaggacgtgatcagagccacagaggagaggagagaggcccattgtatagtctctggatggctagaagggagtacctttagaaataacaacagggcttggataaaaaagaatttcagaaatggaaactctagcccctgggtctcagtttcttcactgaaaaatgagggactttactggatttcttaggtctcttcttgatctgaaattcatcagatctgaggtacttcattcaactcccccacccccaccccaagagtcaggcttatttctgccccacatgtttgcttatactatatttccccacctggaacgctcaacttcccttctccaaatcctgtctgctaggacactaccttcaggaagcccttcatgatttctctttcccactcctccatgccccaccctgacctccacacccatttctctcaacagcactttgcttaaccacgtatttacatagggtctggtattcttacctgattggtctagggattgttttttatcactccctgacccctgacatccatttcttacaggtcctagaagcaggcaggtgctgttctagcctgaagtctaggtccccactccctctgcccacagtcctttgagaactcgacaggcctcgacttgaaaagggtgctaaaagcaatgatgtctccaagtgtgatgggagatatttgtgtctgctttacccttggctttttgctccggttcaggtaggagcggggtgggccggctggcagatctgagagcgtggcacgccccagcgggcagggcgcacagcgcggaggaaggcgcgagtcagtctggagtgctccccatttatcaagctcacgcaggccgccagccgagcgagtctttctatcattacacctctcaaaatccgattcataccactaatcctgccttcattctcccagattaataacatctctttcaaccttcacagtgtgataaatagacaaagagagaacaaaaggagagacagaagagagagaaagagctggagcaagtccccataatagagagagctgagaaagaggagagggaaaaaaggagagcgaacgagagcaggcagcggccagagactgcagctaccttagagagccgctctgaggagagctggcggctgcgccccgctatgcgctccgctccgtccccaaagagaaagaaaggctcgttaacagctccttcctgcctgcacttttgttcaaattcttttcttcccttccaatcctgctttaggtcaaattccagtgaaaatgagtctcctggctttcccatctactcccagcttcccaaccaggcccaggaacccacctggcccttggcagaagggctgggtatgggtacaagacagggctgggaatgggtgtggcaaaagcatgcctaaagctttcccagagctgttctcctaacctaaaacctcacccttttcctgctctttcagcagaacaggaagggaacagagtagagggaggatctgcttggggtcgttcccgaaggctctgtcctcacatctttccaaccttaggctccagacagtgcaatccaaggccctccacccaccgcagcccagccagatggtgaaagtaggtgtccctcaggctcgctaaagcagaagttggtccatgtctccatattataatggagaagtgtgacaaggacaataacccccactgggcccagccccaccctaaccaactgatctctgacacttgtcctctctgccccatgctagcctacacttgtctccacagcacagtccccatccttcacagaggcccagttcaaggcccccttctggatgcccatctgagctctcgcaggagaattcaattactccctctctggaaatccagcagttccattaaccttccttctccgggctctggaaggcaacaccatttatattaccctgtagagatggtgtgcttctctcactcccctgggaatctgtcttctgagttctctatctccaagtcgaagctgcccatggcacagcacttccatctgggcacccacgccctcacaatctagcagagtgggggaggtggggctacaccaggctgccaagactaccctatcccttagcacgcttgtggcaggcgcagggtcagtggggatggcacaggcagagggaagatctgccctgcccaatccagcctagcgggaggagccttctagaagtgtcaaggcttctctgaggacaatgccttgtgaggtacaggaaagacctaagcggaccttcagcagaaagctggtggcctggtggtctatttagagcaggtcccatctagggaacatcttactgacactctccagattctttcctcccaaaagcttccctgcttccctccctctatttcctgccccaaaactcagcctttctctgggccagaatggctgctgcctactcccaccgttcactcccaggaaccccatcacttccagccacagctctcaagtttgcccagtcacatttccacttggggaaataacctgaaagcagaaaaaaagaggcttcacagggccaagtaaaagagcaaaccacaaggggaaagggatgttgaaatgggcagtccttgggatccctttcattaaaaaatccagaagttccattaaccttccctcagctcctacatcagaaggattctcacacttttttctatttcactagccctccaggatcagacacttggaaaagggagggggaagaatgatagtaactgatgttcatccatgggcccaagcgacccaaggaggtcaggggctgaaaacgaaaagcaagaaggagattgtacagtctcagtgaaggggaactgtcctccctaaaataagcccagccagctggtgccctggctttcagggcaggctgggtccaactggccacacaggcccacactgcctctcagcccaaggtcacagtagggttccagaaacttggaatggatctctggtccttcttccactaagagcctgtgttgttggcagatcagatagcctcagccggagtcaactttgtagtaccttagatacagacaggcagcaggcccagacaccctcagctttgttctaaacagcttccacactctctaagcaaccaggtggcttcctggacagcttccccgggggctcagaaagatgctctggcccttgtggccccactcctgagaggagtataggcttgggctctgagaagagaagtcatggtgtcctccctattctatgctgctattgccaaacctcacccaacacacactcttgcccctcccctggccttgcttcctctaactcttctagccctctctgagccctgagcccttcctcccaagataagccaccacccaggcattcaagtctgaggaataaacctcatctcctcaggagagagacaaccctagaccccagtaggggacatgtctggggatcaggtaggaggaagtcagtcagataccaaaagtcagtctgtctctggcagatcaagaagccagatccaagtgatgctcttccctcactccctgagtattcagttctagagctcactccctcctctagacagccagtagcacagagcaggaaaggagaagttgggtcctaatgtgtaaaaagctccagcaaagcgaaatcatttactcttcggtgcgactgctcagcagagctaataaatcttgcatgagcagggccaattctaatttcctaatatgaaaaggcatttggattgagagagagggggagataaaagtgattgaatctccaatagtccaggttactgacaagaaacatcctgcttagccctgagagaaggatggcagcacccgcccacccgcacacacccatccgttctgcccccctcttggcgtgatacatctcagtctcttctattgacaggacgtggctttaaacacagttacacaagttatcatttctgccttctgatcaatctgaattttcaggacaattaccctcttaatcaatgattgctatcagcagccccgcgcctggacggatttctcagcaaggtaatcatgccgccaggctggacggcgcgtgcataggcaatgaagctccgggtggggtctcctccctccttcctgagcccccatatcccagcgctgctgccagcatcgaggacaaggacggcaaagtgtgaaggccacttcaaggagtggtggcagtacaaggaagggggggcagccaccagtcagccttccaaatcagctgattatggaacaaacctattaaaagcctagatttactgcccaccacgctgatgcatctccacatgccctcctgccatcattccttcctcctaattagcctaataaagcccaattctaattatgggctcaaactattagggtgagttaagtacaaagaaaagagaactattggttttactaatctctcagaagctactggttctagaaattccttttcttccatggagctggttcatatgggctactgactggaatggtaggggcagcctcttctcctcacatgcccaggtatccagagctatcataaagccagcctagccttgagccaggaggccacccagcccaacactccctcccgcaagcatcctctcacagatccagccctccatgcttaaaacaattcagaggcccccagaagcgggaaggagaacaagtggagtcagtgttgagtctgctcgaggccattatctgctaccctggggacaactcaaggaagtttctcagatcacctgttgttggtgaaggacttaactagagaggcttggtccagggcactgatgaatgaacttacactcccgcacaggtggcagatatgcctatacagctgtactcacagcagagtaggctggggctaaaacaggtcccaacaatttgctattacatcagaagtggggaaccagaatgagaaagcttgcatgcttttattcactgacatttactgagtactatccacagactaaatggtgggggtacagcagtcaacaatacagcagtgacccctattctcacggagctcacaatgtactaggaaagacagacaagtgttcttttaaaaaggcaaaaatgacaaagtgaactcgcacatgaatgttcataacagccaaaaagtagaaacaacccaaatattgatcacctgatgggagaattaaaaaaaaaaaagtggtactatctatacaatgaaatattatttggcagtaaaaagaaatgaagtactaatttataatacaacatggatgaaccttgaaaatatactaagtgaaagaagctagtcacaaaaaaaaccacatacaagaagttcccagaattgccagaataggcaaatttatagagatggaaagtagatgagtagttgcttcaggctggggcatttgcggggaaatgagaagtagctgttaatggagtttcttttagtggggacaaaaatctaaatttagatggtgatgatggttgcacaatcctgtaaatatattaaaaaacaaattgtacaccttaaatgggtgaattgtatggtatataaattatatctcaataaaactcttttttaaaagaagttaattctgatcaaagaagtgcaagaaacccacagcaggctcatcaactgtgaacaaagtcagaggaggctctagcaccatgcctagctttctgaaggcacttgatataggcacttgatgtaggtgtgtgaagagggaggaagttccactgggaaactggaaaagtcttcactgaggacataagaggagttaagtcttgaaggataagcaggagttcactaggcaagaaggcagcaaaggacttcctagccaaatggaataacagtgaataaggcttggaagtagaccatacaggctatcttgacacagctcaaagggacttggagtgtctcaaaggtcaggctagagagcttatactttgttcagtagacactaagatttttcaagtagagaagatcagtacattgatagtctagggtttgatggttcaggcacaggaaacaacttatcacagttcaaaggggatggttttcggaatcacaatatccagagtttaaatccttaagtccttctcccaataaactctaatgaccagtgacggctaggattttgtctgttttgctcactattttatccccagtgcttggcagagtgcctgacccagtaggtgctcaaaagccatttactgaatgaaaatgaatgaatgaatggctatgttgaactcaatcccatttgacacacatttattgaatacctaccataaaccttggcactctggttatatagtgtgagctcttcaaggggagggtccccgtctgatctctgatctctgccctcagtgccttacgcaggttctgtttggcacagggcaggtcctcaatctgtattaattcccttccctctcatagtctacgtagtttccttaagacccagtgaattcctagataggctcgtcctgaacataccactgtagctagtaagagaagggaagctgaagggatggaaggcttcaatagagcaataggagcaggtggcagtgctaatgatatttgccccaaagcaagccatggtgctctaggaggccagtacacaatctgagtcatccaagctggtaaagaactgggtgggaatgagagaccattctcacaaccctgtcctgcacccaaggcagtgggcctaaagcagggagaagctagcatacttaggtaaggtggaaacataagctacaagacttgtaggtggatgaagaggggaagatctggggcttatttcctaagcagtttgtcctgaccctggagatctgccatttccatatcatccttctggttaggagagccctcctgaccacagtagaaaggggctcattctcccaacccccaattcctatgggcctctcctcccctccttcttcttccctccctttctttcctgcagagcttccctcaagccataaaaataaaataaaacacaaacacccacagtccaggaggagggcgttggacagataatgggcattttatatctttttatgacactccccataggcagctcagcaatcacagcgcaataaaggcaggcatgcagcttgcatagttaaacaactgccgggtaattaggcacagcaaacacaccactggggaggcctcaggcttgccctgggatctgcctgcagcccgcctgcctgcttgcagccaagtaggtgccaagcccaggcctagcaacataagacctggttgtggtgctggggacaggccactgacagctgccataaacacgcttgggttcatgcctgtgcaaactcaagcctacctgcccacacccacacaaaaacactccctaagccagcctggaccttatctccccaggagggccaccctcttttccaagtagggcaatctagggtatcttgagggccccgctttagggcctttgaagaagtcacagcaggcactagcagggactagctcatcggggtagctcaaagcttatcgagtggcacaggcaggaggcacaggaacatacagacgtgtttacatggatcctctgtctcttgtaaatttttactcagtacagagctgaattcaaaataatttttaacacagatgattcatacacaccctatatacatatttctatcactgtacttaccacttctattgtgtttttcccccatctgcctattgacccatccatcttccctaccagaccaggagctctgtacaggtggagatcaggtctgagtcacctctgagtccagaggtcccaacccatagggtgactggtggctggaggtgaatatagatgtcccagcccaggcagagcacaggactcttgctacctgagacctaggtccaggggatgttagcccgaacaagagagaaatgtctttattagggctgagggcactgtaccatacattgcccatctcttctctagtgccccagctggtcaaattcagaaattaaagagaactgaaaaccaattaatgggaaaaataaataaaaacctactacaatcccacttgaagactgagatagccaaaggtcccatctatagcagccatccagatcagccctgaggagtcagccagggaaaggtaaggcacccaagctcaaaccactcttcctccaaggcaggtgacagcaggccaagtcaactcacagaaagaccatgggttgagccagcacggtcacatatgaatgtgaacacacatccagctacttttcctagtctctacctgggcatcacttggtgtctgccaagacaacaaatagaggataaaagaccagaggaagggcctaggctgctccctgccgttagggtactcagaggcccctctcctttccacccacaaagaaacagggagacaacaagcttcttctcaccctgtattctcatggtgaagcccaaagcctaaaagcatttggcttcagtccaagccagcccaaaatgtgacaagtgacagctatccaaactcctccacaatacctgagtccctagctctcctgtcctgatgccaagcaatgccctgccttccctggaccctcaacttcttccaatgggacagtggagccatcccaaggccagacattgtagttggtaagggtaaaagtggaacttctgctgtcttccttgcatctgtctcatgtttagatgggagcaaaaagggaaagcctaagtttccatgaatgatctcatagtggcagaggtagaagaggccaagagaccacaagaagaaactccctcatccaactcccttatttgttagatgagaaaactgaggactcagaaagggcaagtaacccaacaccagagcccacgtctttagtttctagcgtcaagttcagtccagatttctctatgttacaccatactgccctccaaggacaagggcctcatctgcccacctctagtgcctagagtcagaccacaaatcccatactggcacattcacccacattcccatttgtgggcccgtgcacacataagaatatacacagacatactcaagcctgcacagacctccccaattgggtgaatgcacttctttaaacacatacagacatgcatatacaaatgggtacaccctcttacacacacagtggtgtcactctcaagagacctggagtacaaggccaatccctatccttgcccattcactgactttcattgaacacacaactgataatggctgctgtgtgtgcctgggtctccagttcaaaccaggccagactgccttcaggtggtatctgctatgggccaagtgacaagagggaagctatggaaggagagaaactgaatttgcatcctcctggtcatgtggtaggcaagcttctgagtttctatttcagcacccataaaatagggacaatagccctcacagcccctcagtagctgtgaggattaaatgcaatcatgtgtgtaaagtatccaacacagatggcatcaactggggctcaatgcattggtgttctattattactgataaacatggtgaaacctgcctttgcagactgacctacagacagtgtgggagatggaaggcaggactgtgcttctggccttgaaggaagttaccctgtcttttcctcatcttttctgcaactactcccagtttcagggtctagagtagcaacagcaaaatcaaaagaaggggaaaaaacacacacacacacaaaagaaaccctgggacaaggcagactaactttaccctctcagactcaatagataagttcatctttctcctgccaccacaccccatctttctcccaaactgtcctcagcttttctacagtatttatgcctcttagtttactgaagtcccctctatttgcctagctctgtggattaagagaagcggcttatctagtccctttcctcaagtggcttgtggttcctcacccagacagaccagcccatacacaataacaaagaggcatgggctctgagctgcactgggccctagtaactggcccaaagtgttggagtacacactcaatagaacacctaggtttaaatccaggtcccaaacacacccagcagagctcccaactttcctgtgctccagagcaagcccagaattcacttcctcaaggactcaagagaggcaggtgaggctcatcatgggactaggactaagaggctgcctcatttgacagaatacagactctaagcagcagccagcaagagaaggcaggccctagggtgggcctgccacggagggcactataagaactccagaggagaggtcactttgcagcagctgcagggaaccttgagagaaagacagaatcccagctgccttgagctgattccctcacttgcttctttcccctgtgtggccacacccaccagggatgcagagcaaggcaggctagctctccagctgagggtgtgccaagctgctcatctaacacagagtgccagcattcctctaagagctttacaagcatgatctaattgattccccacatttaccataaggatatagaggtcttctgccaacggtctcagactgtccatagctagtatgctaaaaggtagggtggccacttccctccctgctatccctggcccacgggctccctcttcccttcatgcacacaaacgtggcagttttctggagctactgtaccactcttagaaggcagcttaggctggcaccactctagacactggccaatgattgcttactgcacatgctcactctcactcctctttctccagtaaaagcatacacatggctggtccacatgagtagcttaaaatacctgaaaactgctgtgtgtagttccctaatcctgcaacgtgcttcaccacttcaggcctttctttacacttctccctttgcctggatgcacttgcaccgtcacctgagaatatactcatctttcaacactcaagtatctccaccaaaacctttcttgattttctctcccacaccccaaataaaaatgactcctccctcctttgcactggcagcaacaaagtaaagcagttaagagcatggactctggagtctactgcctagactcaaatacttactctatcactcaccagctgatgaacctctctgcccttcagtttcctcacctgtacaatggctaataatagaacttctcccttagaattgtttgaggattaagtgagttaattcatataaagcatttagaacagcacctggttttattattactattaattatctctaccttacaaatgaaaaaaaccaaggttcagagaaggtaagtaacttgtccaagatcataacacaggtagatgataaggccaggaattgacctaaggtgaatgtgcctctgtactccattggacagccaggcatgctgatggcagctggaatcaagggtgtgagatgatcgactctgtcccgcagtgtgagctgagggtaagctggtccaaggacagcattaagctcatccttgccaatgctcacatgaactctgctgtgagagtctctttttcctagctcctgcccacaatgtcctgtatgtctacctggatctcccgtccccctgactcctcttctcccgatagcctagtcatctcatctccagtggccagtaccagggacaagcgaagggcaggggcatagtgctaccattttatcctcaggtcaactctagaaggtggatatgatttttcttgttttatagagggagctaccaaggctcaaagaagttaagtgacttttctaaaaccccacagttagtaagtgtagagccaagattccatatcaggtctacttgactccagagcctaaattctgtgtgacagatattaatcatcatttacaggttcagagagggacttgctccagaccacacagctagtgagtagcaatattagaaatccaagccagactcctctggctccaaagctcttcctttgcacagcagtttctagctgtgagccacatcccacctccccaggactcagcgtatataccatgtatcacctgaagactaaatggggggtaaatctcacatacagccatactatttttccaggtttttgcagataacattgtaattaataaaatacaggccaggcacagtggctcacacctgtaatcccagcactttgggaggttgaggcgggtggatcactcgaggccaggagttcgagaccagcctagccaacatgacgagaccccatctctaccaaaaatacaaaattagctgggcatggtggcacacccctgtaatcccagctactctggcggctgagcatgagaatcacttgaacctgggaggcagaggttgtagtaagccgagatcatgccaccgcattccagcctaggtgacagagcaagagactgtctcaaaaaataaaataaaataaaataaaataaaataaaataaaataaactacaaatccacgttaaaaaaacaaatttactatagtttttttttccattatgtactttatcattatatacccaaaatacaagttccaccaagtcctgaagaacgaagggaatgtctgtggcgttttctgacattgctaatagctccttgtactctgtctgcctacttctctaagagctctccaaaaccacacttaggtacctttcccaaggtactgtcctgattcttggttacaaactcacaatcgagaaatgtattctgtatggaataactgtccaaaggtcaacagcagcaataggaggcacaatcccttctgggacctgagtcccataaatgctaagaactaatgcagtttccagcaaagtggacctaagtcctgggctatggaaggaaggattcagggcaatgaatttctgtctttcgtaccttaacctctaattccttccctgcccacttccctaagatacatggtctggagaaaagagcacactgacctgggttcaaatgctagcttcacctcttcctggctatgtgcctttaggcaagtttcttcatttctctaagtttatttgtctgggaattccagcagaggaataggcatccagactctggagctcatcagtctagcccaagattcagtgtggattaaattaatgcttgttgatgcctagtgtgtgccaggtccagtgccatgcactggaaattcagagatgggtggtatattgacttcagtgaactcacagtatagtgggaaacaaaaacatgtaagcagataattacaaaagcatgtgatacactcaatacaaagttctgaagccatacaaaggaggaagtgactatttctaccagagatgggggaacatcagagaaagcatcacccacaagggttttgaaggatgaacaggagtttcccaacacactaaaaggggaaaggcgatgtaagaaaagggaacagtatatgtaaggggaggtgagacagtcatgtatatttgaaaaacaacaagtttgatatggctggaatgttatggagagacaggagatgtggagataggaatggtgcaatgagctggatcatccagggccttggtatcttgctcaagagaaaagatggagcagagccttccatacctacccttggctctggtgctcttcctgtcaaaacaagcaccctgcaatcacaccctttcctgtgcctttgatttaagagttcctctcctggccctgacagtaaggcatttctgtcccacagattataactcactctgggctattattcagctccccagccctggccctgctgcagttagtccaaacataatatccttcatgcatatattatctgtctccctattatctggaatcatttcggaattaaatttcagtcctgcaatattggcttcaggagcggcgcgctttatgggctagtcaaaggttagaataccaatcaaagtaacagtgccgatgcagtgagacattttaatattccaaaacctggtaattgtaaaaggacataatattttttccctgattaccccaaaggcaacacatgttaacaaggcgagggaaggagtgaaagaaatttcagagttcagacagctgtaagacatatttaaaggaaaagcccaggctaggcactacaccatgggggcagggagatgggaagaaaggagacattccctctagctccagcagcccctgactccaaagacagtactttccctcctctatctctggactacactccaagagcttaccccaacagcagatgttgcagagaatgggatgaaaggggaaagagttcaagatctggagtctcaaggctcaggttcttgtttcagcttacaattcagtagcctccagctcccaagactgttccctcccagggttccagcatcaaacccagcagcaagcactctgggctgctctcccactcactctcttcttatcccatgcctgtgctcacacctctgcctcatctatacctagtgctctatgcgtgtgttttttcccaaagacagatgaaggccctgatctacttggcctgcagagctgattcccatcaggacaccagcccacaactgcccactgccccatggacaatgctctgcactttggatgatgccaaagaccgagaccacagccccagcctgcttctgacctcagagggacccagaagtaactgccctcagtgcaaactctccccctctccaaaataaaacaaaacaaacagcttgcagagcccctagctattcatacctctcttggttttcatttttgtttgtttttttttccaagttagcttctgaatggccccagtagaggagctctgtgggcagcaccttgcagccacccttctatagagtcctagcttctgtagcagcttaatccccacagcccccaaaaagtgaactggctagcagggttttggatcccctcactcctgatgacttcccagccagctcagcccacttgctgaagcctccaatctgcatcatcccgacctgctgacctgctatggcccccagcaaagaacttcattaaggccgagaatttattcctccataagcccttaatttattactgcactgattgggactctgaatgctccaaggtcaggaaaagtcacactcaatcgtagacatcaaccctccctttggcagtttctcctgctgcaccctcccaggggagagggagaaacagaatgtttcttggagggacccaagattttctttaagagctggtcctcatccaatcctcttcggagcacccagaaattgcagcaaggcatagtgtacggatggcagaggaaaagtggagcagcaatcttcataccctgatatatcagggtctgttaaattctaggtggcccttatccctacagctgctgggtttgactggctgagccctgtctgccaggactgactcagaatcctcctaaggctgcctgcctgcttccccagaagcccacctccctcagtccattttgtgttgctataaaggaatacttgaggatgggtaatttattttaaaaaatcgtttgtttggctcatgattctgatgcctggaaaagttaaagattaggcatcgggtgagtgcctcaggctgcttccactcaaggcagaaagtgaaggggagccagcttgtacagagatcacacggcaagaggaagcaagttgagacagagggggaagtgccaggctgtttttaacaaccagctctcttgggaatgaatagagtgagaactcactcacatccctcactcctgccccagggaggacattaaactattcactcacaatgcagacacctcccatttggtcccatctcgaacattagggatcaaatttcaacatgagatctggagaggacaaacatccaaaccataacaccaccctatcaggcccaggcgtcagagggaattccacacaatttgcaagtatgtgcagtgtgcacacacttgcatggctatgtgtgtaggtatgcatttgtattacatttatacatatgtgtccatgcatatgcaataggtaaacatattttatgtgtgcatgcatacatacacatacatccttatggaggtctcttccatcctttctgttttttgattccttattcataataacattcttttccatacaacatcagctacccacttccatggccataccttggaatctgccaacacctagaactgccccatccctgaaatcactaattcagacacctattctctaaccataatctctaatccttccatctggcatgttaaactatatccactataccaattcctcattttgttggtacttatttactttttccatatccatcagaccccctgctatcttcttttcccccaacatccagcttagatcccataatccatcttgccaactgctctcttaccaatattttcaattccctatccctttcatcaaacctccctgaggaaaatctccaccctgaatgaatctaaatgtctactttctccatgcccacaaccaggcagctgaggtccaataaagaaaagtcatacaattgaacagagtggttccacaatgaattaataccatcaacctcaactggatcctcaacactgcatagaaatcctactatacttctcaagtcagctcacacatctattctttagtagaactacggcaagcctgtaaactctcccagcccttccctattagtgatcagcaaatgactcatctgtttcacacagaaaaataaaagccatcagatggtaactacctcaacctgctgccaccaaatctacaagcctacctacctccatttgtgcccatcttcctctccttccctcctgtcacaatagaagcagggaccttccgcctaaagagagccaatttcaagagcctaggttctccaccccttctcctctcacctcctcagaggcctcccttactggcttcttctccctcctgcaccttcaacaggatttccttctctaatagatcctacagaaaaacacatgccttctaccttaaaaacaaaacccgctttaacccctacttgccccaccacagctcttgtcctttctctcaccttcaaagcaacatttctgaaaaagttgaagtttctccacctcctcatttctcatttactctttagttcactccaatttggctcctgttcctatcatgccactcaggaccaaggtcactgaggcccttgttattaacaagttcagggctcaaattttagtcttcatcttgtgtagccctctctgaactgaccactcctcttcttctgaaacactttttcttggtttctgcaataccacactcttacagtctttcttcttctatcacttttttactctctgtctcttcagcatttagcaaaactgaatttaagttctggctctgccatgtactactgtgaaaccattgagcaagtttcatcatcgctccatgccttggttttctcaaccttaaaatgtgaaaaataatagcaaccactgcactgggtcctgcgaggactagacaatgtaggtacataaccatagcgtctagcacagcactgtccaatagaaatataatgtgagccacatatgaaacttagaattttctagcagccgcactaaaaagtaaaatgaaacagacaaaattattttaataatatattttattttagtatatccaagtattatttcacatgtaatcaatacagaaaattacgagacattttgcattttttcataccaagtctctgaaatctgacgtgtaacttacacttactgtacatctcaattgggatgctaaatcttcatcagaaatacttaatctgccgagtgcagtggctcgcacctgtaatcccaacactttgggaggccgaggcaggttgattgctgaggcaaggagttggaaaccagcctgaacaacatggcgaaactctatttctactaaaaatacaaaaattagcttggcatggtagcacacacctgcagtcccagctacttggcaggctgaggcacaagaatcacttgaacccaggaggcagaggctgcagtgaaccaagatcatgccactgcactttagcctgggcaacagagcaagactgtctcaggaaaaaaaaaaaaaaaaaggaaatacttaatctgtatttagattttatacaattaacagtttaaaatgtagattcaccaactcaggctgtactaaacataaaatttttcaagaaagtttttaattaattaatttttttgagatggagtctcgctccgttgcctagcctggagtgctgtggcacaatctcagctcactgcaacctccattgcctcccgggttcaagtgattctcacacctcagcttcccgagtagctaggattacaggcgcccgccaccacatccgactaattttttgtattttttaaataaagacgaggttttgccatgttggccaggctggtctcaaactcctgacctcaggtgatctgcccacctcggcctcccaaagtgctgagattacaggcatgagccactgcatctggccaagaaagtttttaatttaaattgattaaaattaaataaaatttaaaatgtgttcttcaatcatactagctacatttcaagtgatctactgccacatgtggctagtggaaattatgttggaaaacacaggtctagcacacaaaatgcaatctgtaattcaggactatttattatattctctatttttgactattccttctgtatctcgcaaatgttggtatttctcagtgttctatcctaggctttcttctcaccctataccctcttctttggcaatctcatccacttccatgctttaattatcaatcacagaccaataacactgccaatttttttttatttctttgagacagggtcttgcactccaggctagagtgcagtggtacaatcacagctcactgcagcctcaaactcctgggctcaagggatcttcctgcctcagcctcccaagtagctaggactatgagcatgcatcaccaagtctggctaatttttacatttttttgtagagatgaggtctcactatgttgctcaggctggtcttgagctcctggcctcaagtgatcctcccacctcagcctcccaaagcactgggattacaggtataagccaccatgcctggtcttcaaatctgtatctcttatctaggcttcacccctgagccccacacctatgtacttaactgcctcctcaatgtctcaaaagcatcttaacacatatgccccacaatgacttcatcttcttttccaattctgaaacttctccttctcccattatctcagtcaactcattccaattcactcagttgctcaaatcataaatcctggggtcatcatggtctcttccttcatcctcaaccctcacaaccaatcaccatttgctgtttattatataatcagtgctactataatactctttgaaaaagcaaatttgtccaatgcaactgatgtattgggaacaatttatagtaacacaaattttgcatttgttaatgtgcaattttgttcacaagaaacactagataaacacaggaaactatacctcactgaacagggctgggtaggaatacataaaacacatacatgcacacatcttaaacatctaccagccacctagatcaccacatgttatggaccacattcatctggttacaattttccatctgatttcagatgatcttcttccactacttcataactcacaagctgcaacccttctcatgcccatttctataagcaaacttcggggttttacagagtaaagtaccatatttattgtggtatttatgtatttcttaagcatttaatgtgtaaaactatgctaccatttttattagattcctatcttttatgtgtcactaactgaatttttattgcatgactttctctagcatggtgattttcagaaatctctatgttgcattatagcagaactgactaaaccatttaatactcaggaattggcccatttctctacatttccactgctatcagttcaatcgaagtaattaccatctttcacctggaccacagaaacagcctaattctgtggttctcaaccaaggacagtattcctccactcccaccctgtccaggccactagaaatgtatacagggtgatattttttattatcacaacgactcggagagggtcactattggtattcaatcaacaggggctggggatgctacaagttcagcaatgtcacccacacaatgatctgtcccaccaaaaatgccaaacatagctctatcaagaaaaaccagcaactggtctcctgtatctgctcttagctccctctacactgcagccagagagaactttcttagaatgcaaatcagatgatgcccctcttatatttaataccctttaacagcttcctcttaccctaaacatcaaggtcaaaatcaaagtgtggtctataggctcctgacttccttctagcctcatctcatgccactctccttttgccaccttcactacattttaggcattcattcactcaacacataaggattaaacatctgtgtgccaggaactattcagagcgatgggggtagagcagtgaacaaaagacacaaattctttctcctcttagaacttacattctagtttcatgaagctgccaggcttcttctcctcacctcagggtctcaccacatgctacattgtgcttagccaatttcaactcattcttcaggtctcagcttagacatccttcctcagggaattattctctgaccctaccctactaagttagttccttcttacatgatccatgactctgaactgtttagtgttactcaatgcaactaaaattatttattcaacatccaccttcttatatccccaggccctcacacagtacctggcacacagaaggcattcaaaatatttgtttattggccaggcacagtggttaatgcctgcaatcctagcactttgggaggctgaagagggaggactgcttgagcccaggagtttgagaccagcctgggcaacatggcaaaaccccttctctacaaaaaatacaaaaattagccaggcataatggtgggcacttgtagtcccagctacttgggaggctgaagtgggaggatcatctgagcccgggagttcaaggctgcagcgagccatgtttatactaccgcattctagcctgggtgacagagtgagaccccgtctcgaaaaaaaaaaaaaatatatatatatatatataatatatatattcatttatcgatgaagagatatatatatgtttacctgtgtgcatgttatctttatactttatgaatatgtatgtataaacaccttcatgtctgggtatgcctgcaaatatttctgcaggtgactgcttataggaatatgtgcatatacatgaaggcatgtatggatacagacatgcaatttggagtatactcacttgggctgtatgcattcacatgcatatacatgtgtatatttatacatgtgcatatgtgtgtgtgtgtgtgtgtgtgtgtgtgtgtgtgtgtgtgtgtgtgtgtatgtattcttcaggcccctcagtgacagctctgatctcctggagggagctgggagcagggccccaagtcctgtctaagatgacagctcaataagaatataagatcattcaatgacattccaaatgtcagcaaacacgggcctgctccactctgctacaggggaagtaggtggcagcaggagatgtggaaacttggccattgaaaagttcctatttcctgatgcaacccacaccatttctggagaagtaagggcagctgaaagacattttgcctcttctcagattagaggtcttaggaaataggcatggtgaattcatgcccagttgctcactcactaggcaagtctcaggtgaccaagcagaccaggacctttcccacctttctcaaggagtaatgctctgctgggggagcagaggaggaagagagaagaaagggaagggggaaacacaaagtaagatcaaggacaggagaggaccctgtagagaaccagagcctgggtcacacaggggacacaaggcatggagtaagtcttttacataatattcctgcaaccttggcaatgacctctctggctttgcttttatcattactctttttaagcaggaatcttagtgcagcctgcaccaagtcacacagcataaaggtcagaaagagtaccatgcccctgggcctccagactcagcagcctctatgtcctgaatggctgttggtaaggactgagctaaagtccagagttaagccacctctcctgttgggcctttaagcacatttgcaatacaaagtggctggagtgcagagaggaagaggttagaccccttatgtctcccagacttgctcagcttacctcacacgaggaaatcacaaggccaactagcaacagagtcctcagtttcgccttgtacctactattcccttcctcttcaggtcagcacagtctgcaggggaaccaaactgaacagactctgggcagcctgcctttacccccaccctttgggccagcagcaccaaggtggccctgagtgacaacgttaccacatgggtcggctgctttcctgcctttctgccaaggaacctggaggcagggagctatccatacaccaaaaagtctagtgaacttcacagggtaattgttcatggtcagcgcctgcctcgcctggccgggccttcacattgcatttgctgaggccagcaagcagcctcagatgtgctctgacagctggtatgctatgttccaggggtccatgcctagccccaccacatgcctagctctgccttgggggacctctatggaactagttctcaaagatgaatccgtcagccagcaattactcactgagcacatactctatacccagccctggcctagccactggagacacagagaggaaccagacttcatctctgtgatccagatggccatgtctggaaggaaatacacatggattcagtttcaactgagataagtgatttcccaagtgccaaggaacctcaaggcaagagactgactgctgggcttctcagcagaagtgatacctgaggtgaatcttccagggcagggaatatgtctgatgaagatgactgagggacatttcagacagaaggcaagccatagagcaaggcccaaagccaggggagtgcgtagctttttcagcacaagaggagtagtaagcagcagctgcccagtttcatgggagatcagcaggagagggggtatgagtcaaactgcaaacaaaccaagtgcaaagcacctgtccaccagtggaaagcaaacaacttcacaaatgatgccacaaagcatggaactaagtccaaggtcattgtcagtgtggcacaaatacttataaagctttctcttccactgctcctccacatgtttgcttagctccagcccccacacacaccaaaagcatgctgccctccctgctgagaaagcattctctcctcctcctatccatatcccaccttccttgaatgcccaggtcaagactcaaatcctcgccatacctagcctcaccccccttgacctctctcttctctaagccccctgggagccactaccttgacccccggtgtgttctcctttctctgagcttcctctgactggtagcatgaggttcctgaggctgttccaggactgctgcccttaggtcagaatgatttatgggggtgagtctccctagtggactgggcctcctggagcaaggattcctctagagcagggatactctgctaggaaagtacagttttctaagtgattcattctctgccagggctcactatcgtagccacacatggtccttgccggtccatagcctgagcaccaactccccaggtgcttgattctacataagttccagtctctgccctcatgcccaaagggaattggactctagtttccatggctcttcctcacatgagccaggctctcctggagcaaggcaggaacaaagccaacttaagtgtactctgcctcccaaccagagtgatatatcagggccagttaggagggtcagagaccacattgatgatgataacaaaggagaatactttcccagaggctcagctagtgccatgtctctcctagagacaagccagctctgcccacagattcagctctgagcaagagccccccaaaatctccttaactgggacttctctgcctgtctgggggacaccaactagggcagtgtcataatctgcccagcagctggatccccaagcagctctccacagtcagaaataaccacatttcagtgcatattagctaaggaaaaggatgaagttaagaaaagagaagaacaaaaagaaaaagagggagaacagatataagaaaagaaagcaaaggacgggagctctgaggcacaagagcaccaggggaagcacccagttggggctcagacacagtacctttttcagattaatccactgcttgaagtaatccgccactggcaagcccaagtactggcactggcctgggagcctacaaaaaaaagggaagagagaacaagttgggcgcatccatgtcccaggtatgaagtcttaagatgggaagtccaacagagcatacaagacaaacagacctcaaaaggtcaacccattagccatgggtcccaccccaccaaagaaagggaaccccacctccagcaccatggacactgggctccagctctagccctcagatccaagtgtgagagcccaaaaattctttccaaaataatagcagcaggccactatttcctaatggcttacagtatgccaagtaccttatattttcacatttaatcttcaaagcaatgctgagacacaggtactgttgtctacattttacagacgagaaaatgagatgtagagaggttacccaaggtcccacagctaaaacatgatagtgccaagaactgaacccagttctgtctgactccaaagcgtatgttctttctatgcactggtttgttattttgttacagcagagaggcagacagacaagataggaggagagaaaggcagagtatatgacttagagatagatgagcaggggtttcagctcacatttaagcctctggctacaggtttgtttcagatagagaagaggccaggtagaaggataagaagaggtcagaattcaaatcaagggtctgttcttgttttttttctttaaattagaatttatcaactatctccccctctagctggtgatggttttactcagacaaatccattcaaacaaacatgcactgatgcttaacaagggtcaggaacttacgagtcaaaaagtaagatgtaactcttgaccgtaaagggctcagtttgttcagaggtatgggcaatgaaagaaagacaaaaaaagccttaagttggagtatgggggcatatgcaaggatggaggaagacaatactggaagtatcagccaggaaagatcacagtcttattcctaagagaagagctttgctacaggcaatggagagcctctgatgagttgtgatttaccaagattgttctggatgcagcaaaaataatagactaaaagagcagggtagaagccagtagagagaaacagtagtggaaaaaatggtgatcaaggaacaaacattaagatgtaaaggaggccccagtgactaaatgaaatgtgggacccagtgagaaagcagtagacctctgcttggctagcttcatgctactcactaagatagatccaaagaagtaagcagtggcatggagagcctatgtgacatctggagcaggccagcatttggtcaattttattattgttttaaaatgctctacctgtagcatacccactttctgcccaaactgtgggagaactgctcccctgccccatctttagtacgccactagaaggaagcatgagtttgggaatgcagttttagacacatgcttgatacgcaataagcactcgatgtctgctgagtttgaggtgcctagtttgaggcacctaggagatatctggcagtggaatggtgtctcagaggcaactggatatctagttttgaagagaggtctggaataagaccatggattgccaaatcattaatataattattaatgtaatcattaacctaagtaaaattaaagccaggagagtaaataagatcacccggggaacagaatagagcgaggtgagcagagggcccaggctaatgccttgcaagttttattgagctaaaatgaaaccaggttacccccatcagaccatcatcacacacaaggacctcacttcatgaagcggccagatctaattttggactcgattcttagaacatccttccttaaacactagtctgtctccctgtaacttctacccatgggtccaaagtatgtctttagaaaacacagagaacaatacttccatcttttcctcacagaacccttccaagatctgagagtccagaaagcttccatcagagttcccttctccaagccacatatccttatcaacttcaagagttcctaaggagacaatatgccgtgagtcaggactcacccaacctatccccattcccaaagggcagggccccagacctttctcagggtattagacacctaagatcagacatgctcttttgaccccacttcatattacctgtggtcaacctaaactgtgataaaagcatgcttcccctttctgcaatatatagaaatgatttttgagtttgaaatgtaaatcattagtgtcaactgccatagagtggtcaagcaagatgacagctgagaaaaacccaatggatttagtaacgaggaggtcacaagtaatcttggcgaaaggggcatcagtggactgagtgtgggaggcagaaggcaacctgcaaagtgtggaaagagtgagagataagacagcggagattacaagtgcaaaatccttttctagaaagtttggctacaagaatccagttgagatgactgattccactccagaaagttcaaggcagtccggccttccctccattacccttcaaatatttgacagatagtaacagaaaattgatccctttgtttcaggcagtgtatagtaaggatttacttttataagacccaagatatctcacctgaataagaggctactctcaaacatccaagtggcacagtgacattaactacaactggtcagtttcctggaagggaaattctggctgaggccaacatgatgaaggggtatccagatagatgtgcccatgtgggatgaaggaccaagaacatgaggaaatgaggcaaggtttttaaggatgaaaggtagccttaggagctagaatgtggttgcctaagaagcagagctgtaatctgacaataattctatttccttcaatctttctttcatgttccttatccttcatatttgtggaaatgcttgctgaactcagctattttagaaaaatcacattaaggtctatgagtgaagggggccaccagaagcagcagaatctacaaaggaataagccagggggactggccagcaaaaggcagggagcctcgatcttattctcccctagccaactgcagtactctctgattcttttagttgacacaggccaggagtccttttggctctggctagccctgggagagggatgggctctctctttagcagaattttaagggtagacatagctgtaggcatttccactgcctaggaagggtctaggtcagtaggatgatgcctattcttctcagaggaagacctatcccagaggggccacactgaggacagaccagacagtcaggttggatactcagcctgagatatggctcagcagcagtcctgagtgccattctgaatcccatgtctgactgatgcacatgggggttaggcactataattctcactcaggggctctagtcacttgcaggtacacatgcagtttgtagactcactcgcaggaattcaggttgctgagtagtcctctgggtcatcctagccctgtgactccaagacacaagctgtacaaatgtagcagggcccagccccatcttcatgagagacatagggtcaaatgccagaacttgagcttgcaagtgcctcatgggaagacagttacacatctctaccacacaccctaccccagcttagagaggatcaagacaggaaatctgtgaggaaggtgggttagagtggtcatcatcccttacacaaaagaggaaactgagactcagagaagaaaaggatttgctcaatcatacaacaaggcaagggtagtaccagaaacagaacctaaagcttctgactgcacaggcataagctgtatagatacactcagggctctttacagtccctgggaaggcaaagcctgggccttagagaagcaagtagcatagtggtcactgctcaaggtcacacctgggttcaaggttcttaggagcctaaggtcggtgggtatcagtgggtacatggttccaccaatttctcagaaaaaaaaaaaaagttccccaggcacaaagggtctgaatgctgtacattcctaccagattgtgattccaagaaaagagccactggcagtgggccctggactagcctgcgggcacaaacgtgcaggcaggtttatggtgcccaggtctccatgcagctggattcactgggcacaaagctccccaactgcccaaacatcatctggtcatgcttattattgttgcccaatgaaattttatgcaccgagtccacaggtgtgatttccccttctttatgagggccggaatgacatcactgatggccaatagaaaagagccaattatgtccaggccataaaaaggaatgagatttttttcaaccaaatcaaaacttccttcagcttcatgaatgcaagaggcccctttaaggaagggtcccccagtcctgcctgtgggctctaaaccaagggacatgattgctttccaaagactatgggtctaaggccagaaagggggtccgcccttggcatttatcatatgatcctgctattaccacactggcccctcagggtcacctgaaaagattaacaagccctaccctcagaccctaactagctcctctctattccatccagggaaaatgagatgagatactcaagttcctttattactccttttgaataacagaaaagaaagcaaagagcattccccctacttagaaagaagagaacaatatagaggaaacaggggtgtaagaaactgcccctcacccctataagcacacaggacaaagcaaaaggagccagccttccccaccccactcctcattcagccctaccacctgcaactgagccatactggctgggccgagacagccctgatggcaaacaggtgtggctagcccggcgccagccaaggcaggggatagctcattaggggaacacccccctcgctaatgggtatggccacggtgaagcccttgtgagcgggagctcagctttgaagattaggtgaggcagatgtgggggagagctgctaggctgaggcaaggaaagctgcacatccattgaggtctgccggacagactggcagacaggccaacagccaggaccagcaaaagagcaggcaccatactggaaaaggcgatggacactctggctttcatgctttcatctctttaagacttaggggcagacccaactcagggagatgcatgtcattctcacttttagcagactcaaacctttgaagaggagggagaccagcagactctggaggcctccttggctcctttctccctctcaagaaaggctgtgggacctggatcttggagtgatgtgggctggcagtcctggtgcccaccagctccaggacaggcacatactgttcgcctgcaggagcaaactactgtattccatgtgatatgcagaaatgggggagtatggagaggctctgtcttcttcaaagtcatcatgggaccatggaggcacagaaggcccaggcttggagagaagtgggccagtagaagccaaccaaccagccagttggaagatcctgccacagggacacctgtgaggggtgggtgggcttgcttccatgcagagttgccacacttgctcattccaatacactctcaaagaatgctgtccctagcggccctgcagctcataactgccacgatttcctatgcttctctccaagtcttgagcctcaggaaagggcccattcccactggatcccagtcagggagccctatctagtcagagcctccatgggcagcatgatttgagtcggtatccagcacgttcaggctactccagccgaggcagcacttagctggggacacagctctttgtctctcctgtttccattcccccacccagaggagataaacagaccctgggtgataaacagcccgcctttcatgatcacttttcctcaagttgaggagagtagctagtgatggatgggctggaatttggttatcaggaagggctgtcagccagaggtgcctatctcctcccccactacgcagggcatcattacactgtggcatcgaggtaaaatatgaccaaggggagggaaggaagaaagaggggaaggctgagcttacacatggagcaaattgagcaacaatgagagcaggcacgaggctgggacgttagttatctgcccgtgacaccttttatctctgcacaaattggtccttcctcccccactgcatcctcttatacaaacagaggcagacacaatgtgtcaccactgcaacagcgtagcaatttaacccgaattagtgagggggtcaagctaggaaataggggtttctcatttcaacaggttccttagtctcagctctgaactaccacattgagcggaggagggtagagagaaggcagactcataattgaattcactctcttggccgctgctgatgtataaaaaattaatgcatgagcctcctacttatcaaagctggttagtatctatctcacctgcaagatccaccatgtcagaagacacagcatggcaggcctagcactcagtgcctttagtcgggataggaatcagcaaaaacaggaagagaaaagcactgcccaggtggcctggaagcatcctcaaaggccattgcaggtttggtctcaatcgatctccttatagccagaatcccttctatgaggccttatttgtaaagcatgttacccttggttggccataaacccctgcagaagcctacaggatagagtgctggcgagggctggggatactataggagatcacatcaaagctggtccttgacagttcaagaatacacttcagcctacacagaaaaaaggctggctccacctccaacagaagatgtccaggttgttttatgaataacccctcagacagagagtcccacactgctgcgcctgaaactgaggatgccattggcagcactgatggcactgacaaggcaaaacagcaaggaggagaggagcctggccttttccccagtgacctcgcctactgcaggacctggagttacagatggagaaggcaccttgggactcattctccccatcaaagtcccctgatggtggggcatgcggttcaacccctgtccagtaccacagctccactacactaagataacttggtcaaatgaccatgtgtcctggggtaagtgacttcacctccatgccctgctctgtgagggttaaaggagccaaccaagggtaacatgctttacaaataaggcctcatagaagggattctggctataaggagatcgattgagaccaaacctgtaatggcctttggagatgcttccaggccacctgcattgacaagacagtgccttggtcaggaaaaggatactggagaaggcttgctgggggtgacaggaaaagggaaagttccagaaccactccacagctgcaaaacaaattccaagaagcttgggctgagggaaggagatatgaatagaggaagcaccttgggactcattctccaaatccaaagaatcagcacacaaataccaaggaacaaaagccaagaccccaggccagacacaaaatgagagagctttctacctcaaccgaccactttatattcaggagtatcactgagacccaggaccctcagacagaggctagtggaacctgatttctctcttgagagagcttccaggcccactcagaagataaccatagcagacacagaatggtcactgcaggagtgactactgagaagtggccatctcacttctgctggtgggagggcaatgtcaagggcactcagagactcagctgcaattccccaggctcaagcaagtgtgcgtgcatgcacacgtgcggtccctccattctcctctgcctgcccacagccctggggggaatgcactgctgacttatcagcccactttgcccccacacttgcccccttcctctgggacggctgcaggttacaattccaaccacaggcttcagaaagatgatacacttgctggagcctgcaaagggtcaggagagagtactgtttgaaataccagcatgacagctggctccttgtctgtctcttcctccccaaccccctccccaaacttgtcatggtacaagaagtctataagcagcccatcagctttaaatatcagtgtgcgtgaagcaggagcacgagagcaagggagcgggaagccgacagcgagcgcctctgtcgccactgcctgtcagggaacactaatgaatttcaccaccaacagccaggcttcagatgggggtgagctgggggctggagggttttctagggagaactctggcagtattaaaacatattttcccaaagccctgttaataaatgtcatggcggagctgagaactatggcctaccaccaggacttcaatggcagaaaggggtggggcaagccccgctgtcctctcaaacagggaggagagtgcaagcatgatgctggagggagctggctgagccccaaggtgaggccgggtgacctcggcaagcctctcactttgtcttgccaccattacccttccacatctcatcaaggtcttgggatgccttgttgagaggactaggataagaaggaaaggcctgaggcagggagagatgaccagctgtgccttcctggccagacttaccacccaccccacctcaaccaacttcagctcactcacttcacagtgaggccccacggcaaggggttacaggtcatgcttccagatccaggcgaggtggggtaagaaactctggcaccagtcctaacaggaagctacatttcccccacagatgtcaggagccagagctccttattattttacagataaaggaatggaggatgagagtgggaatgtgactttcccaagaccctacaactagaaagcagtaaagccaggaatcgaaactaggtctcttcattctaaaagccctgttctttccacaatgccacacagcttctttgaggaagggctgatcacctcactgtctcctgtgtgtcctctactctcaggctctgcccttcccctccacttccccctactggtacacacgcacctctggcctggcacgggtcacggctgccatgtaacactgggctgggctccaggccagggtgaacccagccgggcagagaaagccctgggaatgagccaggccatcacctgggagtctccacagctcacaggacatggctgcaggcataagccctcccacgggtgccctctgcacagctctgagcaggagtgtctgatctggcagcgacctgctgtgcagggggcaaatgacatttaatttcctcttggtttccctatagtacagatgaaaggccgtcacctgcgtctgggtctggcggcacagctggaagtgttcccagacatgctactctggagagttcccaacagaaaccagaacacaggcagtgcagagggatgctccatggtccaggctgctggtgccatgttgctcaaatccctagtgccaaagttgctcaaagtctccaaaagacactgtatatgcatatagcgcctccctgatccatggctctttatcctatctgccaactgtctctcatttcttccctatggagaccatatgaagcatacaagtgccacaaacacgctgtggaaccatatgacaagcacctccccagtgccacaaatagtccttaaaattctgtaacttgtatctccccagcccctctctagggaaataataagacaagtgcctctccggtgtcctttccatggcaactcatcagggaaaggcacagtgccccatctgtcatgactgtagaagtgctggagctgccaccagggcctggccagagctctctttcctagatggaatggcagaagccccagtagggagtggctatggagaggaggctgagcaagtgatgggaggtttccaagacactgtggtcagtgcctcagctaatgagctattctctttttggccagggaaaccaggagctccttagcagattgagctgtctccaagataactcactcatcccactacagtcttcccctggcctgtggccatcttgaccctatgcctgaactgccgttgtgtggcctatgatgccctctggaggctccgcagagaggcatcctcctagcgttcaggatctgggttgcagtctgacctccgctctcatataggtactcaagacacagctgtacccttaaccttctagctggtctcctctgccctgattccagctcccctgacaccttcaagaggtataagcacttgtcctatacagagtaagacttctgggcgggcattagaataggctagtgatttttaaagtgtgctccatggagttctagggttctaaggaggaacatcaggctacttcatggactgggggaaaaggaggaagaatgggagaggaagaatgggcagggcttttccccatcttcaaccagattcacattgggctttaaaattctgttcaaaagaaaaaaaagtttagtactaaaaaaaatactaccattccatctctctacagtgctcctctggattctcacagcatttgtgttgtgccttcattgtagtgttttcatactctaccttacttaccctatagttaggtatatgtgtgctggtctttctgtcctgatcacttggcagtccccatagtccccagcacagtacttacagggcccagagcagctctcaacaggtgctgactttaggctactaccggaatgccagcacttccgggatatgctggggtcagcaccttcaatggcaatttccaacaggattccttgggagagaagagctgcagtggagggtaactgatatttactgaaaggtcctcgtgaagatgtatatatagcacatgacactcttaaatcaatgaatgggacacatctgctaccacgagcaatcatctaaatcaactttcaggggaccaaacagacttttgcatttggccaatctttgggaaaaatgcaacaaatttcaacaggaaacatcactcattagaagcttccaaaccctgtgtgtgggaccatgggaacataggatgatgttcatcagctgagcattcaagggtctgtcccctggcttcctgtagcctgtaaaggaatcactagtcccatgattctggctataggactgacaatgggtaaagccccttggccccatcaaccaagcctactgcgtgggcctccttctccagctaggtttagggagggggccaggaaggcaagggactgtgctcgtcctagctaaagccacttgttaataggccctagattcctttatccctggggaaaggaaggtagcaatgagctctcttctccacccccctccaccgtgcctcccagcagtgccagggaggacagccattagtgtgtgcctcagcagacaatggggaggagaagtctccagagcaaaggacaactgcagcaattagaatgcagggaggttcagaagctatttaactgggtgacccctgaggtcgctgcatctgactcccatccctggataaatattgtatgagaggggagggggcgagcgagggagccagaatgctgctcctccttccattcctttccccaccccacgcgctgcctccagccacatacaccaggaacattatttacagtcctgacagtcagagcaatcactctgctaaccaagagggaatggacaatgtcgacttaccaaaaattgactatggcaattgaagaagaaaccagagctgagccaacacagatgcaaggctccctccacaatctgggtccagttgaagcaaatgttctgtaaccctaaaacccaaaactactggcaggtgaagctggtctcaatggcagagagtaaatcagaaaaatagagcatccttccaccttttaggggccccataatggaaaactcctggctctcatcactacctaggtgctccttggcaaagatgggagtcctagctacctgcccagaggaagccaaaccagctacatgccacttgtccagcttgccccttagctgacctagttgggaaaggccaagagcaagaaagtcagatattgcagaaaggggtcagggtggtggaagaagagagtgtttgagtgcaggctgtgcctcagcccccacatgcaccgctcctccagtcctgctctaatgcaccctgacatgcctctgaagacagagagctgtttgcagtcagcaccgtgatttgttagtaattatttccatggtgtcacattgctgtcactctgttaacaaagagacaggctgcctcgggctgcctgcgagaaagaaatcgcagagaaaaaggcctgtcaggctcccgggattctctgggctggctggctttcttccccaaaccaacatcctcgcaagctttggaagaaacagttttacagaactatcaagtctgagttgtgtcaccctttagccagggacactgagaatttatcccacccactcatagttgcccttcccaaagccctacaaagctaagcccccagagtccacaaatcattcaggcatgggccactatgccaggtgaagccttgagttccccagccttcaactcctaagacctctgctccctgactcatcatcttcactggggtgttcacagcctctcatgtgctcttaggaacccgaccaaagaaacctaattcagaccaagcagaagcagccaccctattggcatggctggggaataagaagaatatgatggcagggcatctttgcctcttgaatctgccagccccagttcaggagcatagtggctcaggtgccaacacccctgtagccttcatgtgcctctgcatctgtgaagagacacttatggagctgtctccgcatgtgacctgtctttcccagtgcctggatctgcatagcatctgcactaggagaactggtggtttgctttagcacaaagtaatgtctccattaccctggctgggaattagaggacagattggcaagcgctgacaaaacagaggtcactcaccttacaggcatggaaagttggagattaattctctcctctcacagagggaatcagactccaggatagtggaagggaagcaccaatattgagaaaccctttcactgccaagcagcagcaacagcagctaatgtcacccgtaccaatatcagcagaaaaggaagataaaaggccacaagccctagagaagtcctgccaaggtggcaagggctttgccatctagctcctgcagaatcccaaaggacagaagagcctggacatgactaggattcttcaagcattaggtccaaaaggcagacagctgcaagcactggaatgcaaactccatgaaggcaggatgtctgggaagttttctttctttattcactgctgtatccttaatacctagagcagtgcagagcacatagcaggttgtcaacacatctgctgaaagaataaataaatgagtcaatacagctcaaaggccacttccacaggggccagtctctccctatcacaagacctcagagaagagggaggacagtgtgggttccagaatagacagggaagaccacatggccaaaggactggaattagatttgaaagggtgagggggattgggacaagctgatgggcatagggagattctcatattaaattgaagattcacatattcattcagcaaacatatactaaataactaaatacagtataatagatgttccaacaaaaaaagaataaataaaatgtagtataatacaatggaatactacacagaaatataataaaaagcctaaattcttgatacatacaatgcacaggaatctcctatacattatgttatgcaaaagaagtcagacacaggtcgggtgcggtgtctcatgcctgtaatctcagcactttgggaggccaaggcaggcagactgcttgagctcaggagttcgagaccagcctgggctacatggcaaaaccccgtctccacaaaaaaaaatacaaaaactagctgggcgcagtggcatgtacctatagtcccagctactcggaaggttggggtgagaggatgacttgagcccacggaggtagaggttgcagtgagccaaaatcatagcactgaactctagcctgggtgaaagaagtcagacacaaaagagtatgccttgcatgattccatttatacgaaagccaacaataggtaaaaactaaccaaaactaacagaagtcagaacggtggttagctggcaaggggaaggcatcactgactgggaagaggcacgagggaactttctgggatgatgaaaaaggttcttgatcttgacctgggtggtagttacccaggtgtatacttgtataaaaatatattgagctatatacacttcacatttgtgtatttatgcatctgtacctatttcatacctcaatttttttttttaagagacaggatcttactctgttgtccaggctggagtacagtggcacaatcatggctcattgcagcctcaaactcctgggatcaagcaatcctccagcctcagcctcctgagtagctaggattataggcatgtgccaccacaccaggttattttttatttttatttttatttttaatagagacagggccctgctacctcaggctggtctcaaactcctggcctcaaacaatcctgcttcagcctcccaaagcactgggattccaggtgtgggccactataccagacctcaattttttttaaagacccaaaaactagctgatgttcaaaaagggttttaaaaaaacacagatctaagcaatatctcatacaaaggaaaatattttccaggagcaccagtggttccttcttggagcttgggaaaaaaggtcttccagccttcactctctatctgacagaagtcagaaaggcccaagcaaatgggcctaggaaggtgagaaatgttcaaaatacaaaagagtagagcccgggtcccccacctaggaggttgtggcctggtgggaagctgcatggaacctctattccatgccaggtgagctataggaaagcagagataggtcatacagtccagccaggtgcccagctggttctgaggccctctgaagcagcctgtctgttggattccgccacagaatacagaaccagacttccaaagactgccctgaagagccaccaacataggatccaatttgtcttcctgacaaaccaggcagagaccggctgagttagcccaactctgggctaaggtgaaagtctcagaacatacagcccctccagccagcaaggaggaggtgataagactctcatccatggtcaaggggagagcctcatatcaaatccagggccagaaccaaggcagcaacacttgcttctggaccagttaagcagtaaagaaccactcagttatcaactcaggccaaagcatgaggctcctactgccttgaacatcttgaagcctgatcagtcattaagcaagtacctttaccttttatcagggttttcactgagcagaatttccattccaggggttcctataatcactacaatgatttagaccctctgacaccttcctagtgggtgaagaaatgaggttgccactggggttccaccctacagcctagaagtgcccagaaagtaaaatgccagaggccctgtctgccacggaggggttgtgcttgttgatcagacagcagagcttctctcccagtccccattgaggcacaaagtccttccagagcagagcaactatcccaaactcaggctctgagggaaggacatggggtgagacgcctgttgacttgcagctccaggatcacatggataagtgtgaagggagccaaggttgggaaccagaagagatgctttggctccacagaaacctgctcctaccctcaggcctgcatctaggaaatggttaatccccagccaagcccaccatcaggagcccctttagtgccagttctgggcccggggacatgtgcaggagggggctttcatgtttgtgagtaggctagccccaggggcatcaggcagaggcggagcacccctagctcctccaagcccaagaactctcagcccaaggagctgtcaggctaacgaggctaccccaccaccactccatctgagcgtggcaggctgcactgcacgactggcttcaggtggctcttctttaattaatggcatcccgggctctgcagggagcttcaccccacaatgaatggccctctctcattagaggcaagcctgccatgatgtattcagggtgagggccaggattcatttccctgtctgtgggttggggatgggagggaggggaggggcagcagggagagatttatatcgagtgacttggattagctgcagctgaaacatgaccccatcaactcacgctgccttcttggggctaacccggtgcacctctgctgacagagggctctagggaaactgaaaggagggcagaaggtctggttcccactctctctgagctcagactacaactctaaggcccagaattcctatacaaccttcagaacctcctccccctgcccccactgtgcactgggagcctgggctgattctgagccaaccttacccatcaagagactttttatggccaggaagctgacccactgccctcatgttcacaggactgaggccctgactacagcctcagttggcttttctgcttttgtggtaagcaataccctcattccttacctcagagaaggaggccatgacataatttgcccctgtaactgccacctggataggacccaaatatgtactgccacagggcatctcagacctcaggccatcccacactagggaaaaggctccaggcatccgtctgacacaaaaacatgcaatcagccattacctcactaggacgatccactatgctgaaccccacctccagggtggggaggttctgggcacgctattctacttccctccactaccctgacccacccactccaatggctgaggaggaattgcggtcttctaggtaaaaagagaaattggggcctttggctatccaagtttccgatgtacttctcacagacttggaaaggtcaccctgcactctgctagccacataggtggttgtaggcctaggagctaggttgattcagactggtagcaaacagcacacagccctacaaattcctcatgcaaatatcactaaatatgactttcaacttcgcttgtgcttgggagaaaaatacttcagaacctgccctctttccattctcagcccccttagaatgcccaattcactaagagagctggagggtgggctttcacctgtccctgtcggccaatcagaaggctgcctggcaggcctgctgtgtccctaggaaggccaggcaatgcctatcatctgcacacgttcactccatgtcatccatgcttcttcctggccgttgtggagaagcattcatatctctttccttccctactcagaaagagatgtagctcagttctgctttgctaagccctatttggcaatatgtctaaaaacatgcaaacttaattagttcaggaggggagcccaagcacttgcaatgacagataaaagtaatgggaaatgagacaagtcaggactggcagggagttcttactcaagccccttcccccagcaggctgctaatcaaaggtgatgcagctcagtgctggtaccaactggtacacctgtgggcaaggggcaacggtgcgatgccccatgtgcttccaaacataaatacagaatagaggtgtccaaagtgaagttggctgaggtttccttaaaacagacctgaagattcattaacttgtaaccctggaaggaggctctcaggcagcccctaatcatccccaccacatctcctggccaactgggctcccatatcaaatgaacttaacagtccacacctctaccgatatcaaatgaggaaccaacagcccacggtgtcagaaaacatcctgaggctctgccactcagtgcaaacaaaggagaggagaggggcattcccaccgtgtatcaccaaaccacagcccatgaaggaggacggtcagacaggactgtcgttaaacacatggttctagagtcagaatgctcaggttcaaatccctgccctgccacaaacaggttatgtgcccttgacaaattacttacctctctaggcgtcagtttcctcatttgttaaaaaaggattataaaatgaacttattccacagaactgtggtaaggactaaatgacatcatatgtgtaaacagcacaatagggctcctggtaagtaataagtgctcaataaacactctctttattctctgatgttcacttttccaggagtcccaaccctcagttctggaggcacaaatctctcagagaaagcatttcgcactgctcctgggaccaagctcctcctccctggcctaagcctgtgggctatctcacccagtactcaccatggagggcccaacacacagtggcagtgagaaaatccagggcttcctgacattagcagcatagttctctaactcttcacattcaggctggtgtagcaaggcctgagaattcctcctctagtctatttgtcctgtacactggcaatgaatgcttcctaaatctacctactaacagtcctctgttgttcttcctgagcagagattccacaggaacactccattacttagttgtcacttattcaacagttatttattgaacaactactatgtgtcaagccttgtccttgtcctagggttacaacagtgctcacaatctagtgcgagagaaagacaagtagaggcagtcacagcaccattttatgtattaatgtgtacatgtgctccaggaaaacaaaggaaggcacctagagaaagaagagggatcactaggaactggccagctcatgcatgtggctggtggggaggggtgtgggggtgccacagagagtaatgagaagtgaggctaaagatgtaagcaagaaccttgaaagtcccaataaacagtttggactttacccttgagggcaagggcaaaccttgaaaggtattaagccgaggggtgacataatctgctgcaattaggagaatggaataggagcagcaaaactggactcaaagagactagttagaagacttttgtagcaatccaagaagaatatgatcatcttgactagggcagggcagtagggatgggaagaaaggaataaatctgagaaacctctgggaggcagaagcaacaggatttggcaattaattggtgtggatagagaagggataattttcagatttccgacagaacaactcagtaggtggtgccagtcattatttgagggaatgatggaggacagggtgtgaggagaaagataaacatctgagcttgaaggggcctatggacgtctaggtggagatgtagagtaggtagctggatacgcaggtgtggcgtttaggtggcagatgagcccgatttcttttctccagttggagaaaaagattagaagacatcagcatacagaggatagttgaagctatggcaaagacgagatcactctggtaagtgtgaatgtgtagaataaacagaaaagacaaccaggatagagatcaaagaaacaccactatttaagaaacaccaacatgaaaacaaggaaggaaataagtattaatatctacccaagtgactgaggaggagaagccagagaaacagaaaacataacaaaagtacagataaagatgatttcaagaagactgaagtagtcagctgttgagcaatgccaagaggactcagcccgacccgcagcaagcacgtcactaggccacccttccagccatcttccacatccccacaggacggtcactaccccacagtgctcgcccaggtgcgtggttccatcgtggcacctttcactccaggtagcagcagtctcttcagtggtcttgaccgcttgacagcagcctcgaagaaacctcagtagcccctgctgagtgcatgctccccatctccaacagtgatagtgtaatctgggcaagtatctttccatctccagacctcctaaaacctgaagtgaacttcaggtccacacctgcagagcacagccagaatgtagtatgcacaccccagcaagaaggcaggggaaaaaaaggaagtcaaatgcctgcatttatgtgttcaacctctctcctccctcaagggggaggaaaacttcctgctccaaaactgaggctgagcctaagtgagggtcctctcaccagactctgagcaggcccctggcccctattccaccagagaacagcatctgattatcctaccctctccaaaggggcctcttcccagactgcactaagggctagggcctccctcaggtcagctctttccctccagtctttccctcttctcaatcttccttcttctcagactcacggcccactgggaaagcctctagtctaggttctcagccgtgctgtgctacatggctggtgaacctggatcttcaagctacaggctaaaatctaagttcctcaagtgggtgcctgtgcaggtgtcccttctcagtctacaccagcgctaaccccaccaccataccaaagatggagccctttgaaagtggcactttctacctgggtaagcagagaaacaacaccaaaccctatgggaagcttcaagaaacaccaagcaaggcgaagaaaaagtgggtcaggtagggaaggcaagctgaccaagagccagacccacaacaagtgttgtttcttgaaaaaattgagaggggaaattaaatccacatcactaaataaaaactcgccttagcaggatctgtgactacacaacaaagcccacgtaaacttggagaatcaactcatctggctttgacaaaagatggacataaaatgatttgtcaggatgggagcagatttcttttctccagtgggatttatgctgccacttcagttcccatttctcagtgccccacttatcagcccctttccaacaaaagtgatgtgaagctgctgaggggagaaggggaggaggaggtaaggacagcaatgagaaggaaccatggcttccggaaactagagtgtgaaatgaaaatgtttgctgaattcctaagacttagttaaatctgaaaatggatgtcaaaataagaagtaagccacagactaacaagttgtgagtgtcaatttaacaccacccttgtcaggctcatctgcagcctttaccgggcgcataaaaaggtgatggctctgacgagagccatctgacgagcctctgccgaggttccaggaacaccgattagctgtgcgctgtcacgcagcactacttaggtttcctctccggctgtttttattttgttacacatttaattaagagccttcccagcagttatgcagagacctgcttataagaggcagccacagagctccctcccccaagccctgccacctgcttcctttctgaaaacccttttctgaagcttcatcagccttcccagtccaaacccaaaccagcccacaaagtctgccctacccatctcttttggaaactacacggtcttagaattcaattctgtctagctacacgtctttagctctctgagccacaggggtttttggtttgtttcatctataaaagaaagacaataccaccacccaccagagacggcagtcagaaggtgcggatgcggtaaggtatgcgctcattaagacttggcttcctttcatatatggttgggttccacaactcaatctcttttcttgatgatatcatttttcaggaagaggcagggcaatctcctgggtcaccaacacctgtccagggcccactgtgctacagaacaggtcagaccaaaagaagacagcaccctctgaaattccctctccatctcatggggagaccaactccaagcttatagtctccaacctcatgcacgggaaagttttcatatacacatatatgtacgcatcgtgcacagttaaagtagaagattctgaaatgtctgtgtttggaaggtgaagacgccaaagagagaacaacactggatgaagggagtcctggtgaggctacctggaggaagtggacctctggactgggccaaagggccttcctcctgggccatatgaaccccagaattctgggtatcagcctgaaactggccccaccttgagtagcttctcttgggctacagaaatccacattaagtcccttcctcactttaaggactcaaagctgcccaggacgctattaacaagaacaagagtcttcttcctctactccttttccatggactcctcctctgattcatatctgcttctagtcccagcctgtataatttccctgacaaagagatgtcatgtgggaatatggagaccctctggagtaaaccaagaggggtgcagtcagtttgtgtacacacctgatgggtgtgggagatgaggtctctgtgtgctcatgtgatttggggccttttcttcctcctgtctcacctagaaagttggggtccaatagcaggcttgacacccacctgggtacataacttcacctcaatgcccagcattcaaacggcttacaaagggccttggtgaggagatgacacctgatgtggtagaaaatgttactgcagagctactacaccacacccctcagcaacatcccactttatgctcaaaagttcaaacacacacacacaaacacacacacacagagacacacacacggaatacttgctgctaccttcagtcacaatgaacacagaggtaatcgattctatgactcctcagcaaacagtgcccccaccacctccatcccacttcggttccctgggggccatctgaagccatgtatccatgagggcagacaagatgcacaagtgtcaacccagcaaaggaaccggttctgtcttccataaccgggacaggatcaggagacaaaggtaaaaaagcagtggggacaaaggaggaaagaggaggctggtgacgtgggcagcttcccggagcagccctctctcatcccaccactgggctcccagttggttcaccagggtcttgcaggccagataaaggggcagcatagtataatagttaagagcaaggacctgagtttgaatcctggctgtgtgtcctctggtaaattacttaacctttctgtacctttactccctcagctataaaataggaagaataataatgcctactttatatggttgacaaataagttactatatttaattacatagtaaacatggtatttggcttaaaatttttttttccaagacactcttttaactcctcccttccagggcaataacacacagccccagcaatcggaagggctgtcatgagcagtgagacctggcaaaggcaggaaggccccaaccatccaggcaggcccttgacttgcccacaccctgctccagagaggcagaaggcagggctcccaaccgtcttctatccctgatagcctcaaagacctgaagaatccctgatccagctgccttgtagacatttaagcctccaaaaggccagacctggtcccacagattccaagccctgccagcaaagcagcccttctcatactcacatgacttttaagtcccagtctccacaggtgacaaaaattgacttgacgtttggatctaagaggccttccttcgccatccattcatcgaccctctgaaaagtacacaagaacaaatgagattttccttttttttccctgagcctgtgaagagccacaacagcaaaacacagataagctgcttgtaatcagaacaggagaaaattgtaatcttatccagccatggctccactgtgggctctcaggcttggctcagaaccacggaggcatttggaagacaaacccttaggaagatcctgcagcccgaatgtgtagccggagggagcccctacactcgcctattgcctggcagcctgctccagatcccagcaaatcagttcaaataccttgctctgacttggctgttcctctcattggtcccctggcccagcagacaggctgttgtcctggggcatcagaacagggtagtaggaggccccaaacaggagctccaacccacagcttcactcattcatttatttgttttactcttctaccaaatgtttattaaccaaacttacaaatttggttattcaccaaatgaaggtgacaaacattttcaccttaagaggcccctttactggactggagccccatcctgacacctgggacagtgctgcctgctccagttgctaaaagttcaaaactggcccccaatttcgtatttctcctgttcatggttgaggattcaaattcagcagaatattttgaaggctgagctcaattgctacaaagggagaaaaactgctcctaaacactctaaatctttctttcccttcatccctttgatcagtttatttgtgttcacactggaaattcaaatactaaaatcagtatacaacaagagaaatatcataaacaattcaagactgggtgtggtggctcaggcctgtaatcccagcactttgggaggcagatgcaggtggatcacttgaggccaggaatttgagaccagcctggttaacatggaaaaaccctatccatactaaaaatacaaaaattagctgggtgtggtggtgcacgcctgtaatcccagctacttgggaggctgaggcagaagaattgcttgggcctgggaggtggaggttgcagtgagctgagatcacaccactgcactccagcctgggtgacagagcgagactctgtaaaaaataaataaataataaataaaaagaattcatgaagcattgccttttacagaagaccccaggcatggagagggagtcacaccactgcttctacccatgcaagagatgtcacccaggctggagtgcagtggcacgatcttggctcactgcaagctccgcctcccgggttcacgccattctcctgcctcagcctccagagtagctgggactacaggcgcctgccaccatgcctggctaatttttgtatttttagtagagacggggtttcaccgtgttagccaggatagtctcgatctcctgacctcatgatctgcccgcctcggcctcccaaagtgctgggattacaggggtaagccaccacacccggccacgagattattttttaaggctatctcacatagtcattaaaaatgcaggattggaagtcagacacatctggattccaaccctccaacccttggctattccatatcctggctgtgtcactgatggggagtcatttaaaagtcatgtaacctctctgaacctcagtttccttcatctataaaatcttacacagagttgttctgagaattaaatgtgataatgttttaagtacctaccacaaaacaggtaataggctgagaaggggagaaaggcagatcatcataatacaatagatccagcactggagacgtgaccacagtgctacaggaccaagaagaggaagtggctagccctacctttcacagggaaaggagtcagaaaaggcttcacaaagaagataattgaactaggagcctgacatggtggaacatagtagaggatactacaggtagaggcaaaggtacatgtgcaataattttgtatttgaagcaattatctgtttaatgtctgccttccctgcgaatataagcaccacgaaggcaggaactctgtcttactcactgccttaatctctcattcagcataggatctactcaagagatatttgctgactgactgaaaacatgagtaggtaaaagtttaggatgacttaagtccacagtatatagaaagaaaggacaaaggctggaggactaggttaggccagaccgtgaacggcctcgtgtgctcagcaggaaagagacagcccatggatatctttaagtatcttaagtaagattacttctagcaggtataggctggctccctggatacctctgagatgctagaggcctggcccatgctaaagtcatccttgactaaggccaaggatcctacctagttccgtggctatagcagctctaccaaccagaatatcagagctgctccccggtgccagactatgcagaccatgtggtctctaaaccctctttacagtctgtacaccagaaaatcctcctcagccaaagaatcttcccaaaagataaattctggatcttccactgctaaatggtctctctcctctgacccaactccttgcatgtatgtgcacatcgcgcgcgcgcgcacacacacacacacacacacacacacacacacacacacacacacacacacacgtgcaggaatccatgaatcctttccccagggtcacctaagaaaagaggtaaggtgaaactagggctccctaaatcagcataacctcccccaagctcactgttttatatccccaagttaagtgccccacatactagaggggctccccagtgccccaactcctgcacagtgaaagagagagcaagacacaacaggaggccacactcagcaaaactgggcccttatcacaggaagcactcaacactcagtggggtccctggaatcttaggaccccggccattcgcttgcacagcagctattcagtgagcaccttttaccatgagtcaggtaaacatctagctggctgcctgctaagggccttggttcggacaagaaatgagctctttatctccataaccaactcaggactaatgagatgaagcagagcccggtccggtctcctacctgccagaaactctctattcaggctgataccaggaattttccctccttacccacaaagtatacagaagtagcagaaagtagcttcttgggtgagacccagaattctttaagcaccctgctccagggctggcctagggttaacagggggttgcctcctcaagaccacatctcctcctcgactggggccactgagaaaaaaaacccataacctcaagagtcctggtttgctgctggcccagagcaagtatcttcctccaggatcccagctacagatgttccaggaaaaaggtgcctgtcttctggcatccctcaggagccaggtcctggctggggatggtggctgggacagaggaaagaatgagttccctctgtctccttgagtctggtttaacagggagcagtccatgctaaggagctcccttggtcataggaatgaatctcttcaaaaaaaaaagatggtcaatatggctgggaagcatctcagagctcatcttatcttctcccaatctaccgcaggtgcccaaactctgactcccaaccagactggtcacagcctaggttcccacactcccagggacaggaaatacactctgccactgaggtgagcctaaacttgcctctctgaccctggctccatccttgggggccccacgaaattcaatctgcatctctctcctccatgggacaggatctctcggctaaaaaaaaggtatcttgccctgctccctgccactacgctacttcctctaggctgcacacctccagtgcagatgtgccctgctattcctgcagatactctgctttctcctatgcttgataaggtctgagctttggctttattggtcttaaaaaataaataaagcacctaatgagatccacgggctttttctcttctcccctccccctatagagaaagacatgggagggggaccttctccccctgtgaaaacctccaggccagaggagggtgggagacaagctaagaccaagcactgcccttccttattccctcgggctacagcgcaagaaacagcatcttaaccttttctagctccccgaggagaacatcctagaagtgtggtctctgccaagggttttcaagtctttaatttgatttccctcacataggcaattgttgtaattattctgattaggaatcattacccagtgcagcctctgcacccgacaggcacaatgcatccagcggcaagctgcagtggggcaggcgggcccagccacagctcctggaggagctctcagcaaacaaaagccatcgatgcggagttctgggtgagttaatgaagtgctcacatgccacaagaagccaacactaaagctaaacaaaaacacctccagtccctggggctagtcccacagtaccaagctcagctcccctactccccagcccacccagcataggctaccccagagtcagccagcatagggccataggccaggaaggggtgggggcccctctgcctgactcctggcagcactgggacatcttgtcagaaaccctgacgggaacagctggagatgacagatcaatggttcaatactctcaacagcatgtcactgatgtgacagcaaatgttattctaatcaagccataatcatagtcaaattacacggctacattctcaggaggggagggagagaaaggcagcaggaaggggtcagaggtcaggaattaaaggtcactcaacctacctccagcacttgctgcaggcttggctgaccatccaccatggcttgaataatcccggtgagctgaaaggaaagagaaatagccgatgggtagaaaaccagggtgaagggactcaaggctgaacaggaccccttcctttctgtttttctccttctgttgtaaagggctctgatctggcactgctttaggttcagagcccacctagaagacttgggaataaagtcccaggacccaggacacaatgtgtgcttctcccataatatcctgccctgagatgggtgtacacatacacatgctgaccacaaggcgtgttctcacacctgtttccacaaggcatgttctcacacctgtttcagctttcagtttgcaaacaaattgatgttacatgtcttttgtattcaataggctcaataacttcccacaattacagtctcaagtaaattcagctcctagcttcacagaagttcccgtaaaacttggggagtgctcatacaggagaggcacacttggtttcaagtccaccccttctctgagccttgatatccagcactgccccctcccacactctccctaacaccttccctaacatccatgaagtcccacaggctcctatccttcaccctgcatacgtgggccatcaatatgaactagccaagcaagagacagagtcatctttaaccaatggggaaactaagacaaaaaggcctaatgttcagactatgacctagagaatttctgactcaggcctatgctccacctaggtcaggcctgggttcaaacaagcttgttgttttgctttgttttggtttggtttaaagtaaaaaaaaaaaaagactggggatagattgcctacaaggatctgagggcatgaggcccccatgtcctggacaccaactggaaatcaccacccccagcatgtccctggctacttccagaaagagcagtatctcagacttgcttggaaacttcttttttttaaagtgtgttggggggggggagattaaactccaattaaactataattacacttaatgaataccaaatacccaactcacagaaattgctggctctaaaagggaaggttattttctcatggtgacttacatggaatggtaatatacaccttttagggagaaattttcattttaaaaacgctgagctcctctaggtgggtttctgtagttcatcaagtcattattaggtggtattttaaggaagtgtaaggacacagccactctattttatattccagaaactgtttttatattaatctgtattttaattgggtaacagctgctgcctacagacttcccatggtctaaaaggaaaataaattagaaagattaactacactgttgttttgcaaagctttaacccacagcatgcccacccggctggcacctccacaccctttccttgcctggaagaccaaagaactgcccagtagagggagggcctgagtcaaagagaagaaaagatggtccgctaagggctggggggctgggagtggggaagtgccctcagtcagcagcttcaataatcttggagtacaaaggactcctccttttatttagtcaacaactattcatagaaagcctactacgggctgggccgcattacaggaactagagatccggcagtgaagaaaaatgtaaaaactctgccctcatggaatacatgttctcagcagccccctcctacacccagccccaactagtaccgagagcctctacatcttccagagccgcaaaccgagcaggcagttgccctgttttgcctcaggcatgaaggggccaaagagagtcaggaggaggcttattaccaaccccagattagtgacagacacccacaggcccaccgctgcccattctggtccagcttctctcctgttaagcctagggcttagacacatcttcaggcctggagctgaggctcaacatcaggaccatcctggaaaaggcggaccacagccactctcacttcttaggaagctccagggtccaaatgttagtcttgtgtctggtctgagtttcaggcggcaaggttaggtccactccttctcttggctcccaccaagggtctctcaaatgagctgaatgccaagggcttaaagaaagtctcactcacacaggaaagcaatgcacccttgccaagagccctccctccctggagataaggcttaggtcagcacctgtgtgtaccccataagcccctgccctgggccccaggaaaatcactgatgtggggcaagaaaatcactacaccaaaatggaaaaccagggtgctgctctggtgttctgctgcaggatgcctcactgcagactaaacccaactctcccacctggagctggggaaatggagctccagcatcctggggctttcacaaactccactccagtgctcagtgatcctagaatcatcagcctgggaggagcctagtgaggtcagctccttctctcaccatgcttcccagacaacagccattttcatttgtggctcagtaaagcatggctcacagctgagctcctcaaggatttgcatttagcccccagagacacaggggcttgagcagttggctcagctagacaaagccttctcagggaaggcctcaggctcctgtattaatccctccaaggatggaccaccccttttcagctctgccaaggcactggacaaagaagggatgaaattaaagttagttctgggctgggcatggtggctcagcctgcaatcccagccctttgggaggctaaggcaggaggactgcttgagcccaagaatttgagaccagcttatgcaacatagagagaccccatcttttttttttttttttaagtaaaaattagttcctctacctgatactaatgacctataagacacgtgtaaggtttatacaggatgctatgagggaacgagacaattttatcaaattaatactgggaagttctatcttaggcctaacttaaatccttcatgttacagtttaagcccagtcccacttgggttaatacatgtttgtaaaaagctttcactccttacaatgaaaggtactagagcaaagccaagtattactaagctgagaaccagggctcacaggctaaacagagctcagagaccttagccacttaaagcaggagaggtgagaggaagaattaatgtgtgctctgtggctcctttcaatgagggattacagattaactcccacttctccagactcagaaaccacaaggcaaggggcttttgaccctgactgataacatggctggttactgagatcccctaccctcacaagggctttgtccaggaatgagctggcttcatcaagaacactagcaactacaggaagcagcccaggaaactcagtgccaatagcatgtcagcatccagtgctttctcctttcacagtttatctccaacacaatcgtattctgacaccaagacagtttgttgattacataagcacttgtctctggtgtgcaatctgataatcagacccactctttctcttcagacaaagagaccaataaatctcaccctttataagtacaggtgcaagacaaagccctttactggcacttagcaaaatgagtatttctctagtttttttttcatgataacaacaacaaaaagaagacatggttagggactgtgcagcagcccagctgctagagatagagacttgatgaactggagcagattctagaggtcaaagggaaagggctcgggaaggaatgaaacacatcccatcctatctctgtcagaaccacgtctccaggccgactctcaactgaaactaagaagggacctcaagaagggtactaacacattcctaatatgaagcagtaaaagtaggagtctctctgtgtgtgctagagacttgttcaaactggaatccttcttcctactgtccagcactgagcctgcttctctccccaagcatgtgcccatgtgtgtgcacatgtcatacgcatgtgcgtgcacacacacacacacacacacactggggttaagaacttcttgtgcacaagagagaaaatcctgccagaggaactacttaagtataatctggaggtttgggactgttcctcacacttactaatgagagattttctctggttggaatgacctccatccccacccgcaaaaggcaccaactgccaggttggatgaggtttcagaatgacagcccccatcctgtgtctatgcctctcggagatacaattccatctggtatggagacagggcaaaatatatatgatctgaggttttccaaacaagactttacttacttactcaaaataacaagtcagcagtacagttgtttttgggagagacagaaaataactccttgacaatattcattcatttaagggacacgtatcaagtgtttacttggtagcagaccctaatgatgggatggagatggatcaggtctagtttcttccctcaaagaacttatagtctagtgaaaagacagataaataattatagtataaagtatctgatcagttctatgttggaataagcacaactcaatctggggatcagggaaagtgaccctaagcagagtcctggaggtcaagcaggagttggcggggagagtgggaactctgtgcaggcaggaggaccatcatgtgaaaagacagactgtaagagggcaacctctgggtgaggggagctaggtgggagatgaagcagagagatatgaggctggccaaaaaaggatggacaagatcatggcgagttttgagctctggaaacctgagacaaaatggcagacccggtgcctacagaacaaccacattttcacttttagaacagccttcataataaagatcccaactaccactcctactcccctccaaattatgtatgtgcatccttgggtgaagctttctagagagaagaaactgttcatcatagtctcacaatccctcctcccattcccacaaaaagtagcagcagcagccttactctaaaagaagtccctcttcttccgatactctcaagcatccactcctgcccagggtccagctccagcagaatactgttacattcctaaacaggtagcaaacttactaaaatttgggcctgcctgtctacgtaaggacaagaggacattagcctttcaaggccagtggagggctcaggtaactggctggcttaaagaaagtctttccttcccttcgcataagcaagggaattttcatcatcattaaaatggtgatttttcaaaaagggcagaaaagtcagattagcgccccctggtggtataggtaaatcccaggggaaaggggaaaccccggcagaggaaggcgaaaaccagaacccaacatcattagttggaataacaaaaggcttaagaggctaggcgccttggcagatggatgcctgcaacaaaagccccacctgggtcagctggcaaacactggcatcgaattcaggagcaacctcgagacctcctgtctgggctaagtcagcctcagggcccaccagggtcaaacaggctcatccccagccttcttaccaaggagactgtttgggataactcaagaaccctttttcacctatttcattcacatgtagaagataggtctctaaatgaaggcacaaagtctctaatgtacctcagccccagactcttaaaagattctcatcacccctgctaccacacattcttaacccctgattgcaccacagcctgttggccaccactgagtgcattacatgacatgtcacagggaaaagtagccacagaagacttcacacagttctgggagttagaacttgcaggggctcctcccctctgccaatggctcttttgagcctccagcaatcattaaaatctcagttaggcccagtttcacaatctgtaaaatgcaaccaatactaacctgctgacaaggaggccaagtacagtacccacctaggataagcagatttcagccttggccagccaggtctcatgcttcactgagaccactcttctcttccctcggtgacagaatgtaccttcgacaaactcaacctacgcttcacacaggaccactttacaggaggacagagtaacaatgccagaaagctaagaaggcctgaacataaccctgccttccaagtggctgaaatctttacctcttgccaaggggccctaaggaaaactgaactggaaagaacttgaaccccagaaatgccattctgctcctggtctccaagtgccggtcaccaggaagggatgctggggaagcaggggtagactaagccactgctctccctgggtccccagtaacaacagtgacctgagtggagtggcagacttcataaaacctaactgctaggtctagtgtgcacttgccttaaggattgataagccctatgctttctctaagtggcctatatagagcaccaaggattccaaaattcccctcccagcagcccctgctgcccacttccagggcccttacctctgtacagaatggggtaagctgtggatggactacaggctggacatacatgtgaaaggtagactcaatctccatggtccggccatttagctttaggatggggaactcgatgatttcctggagtgccaaagatacagaaaaggaaaaataagttattgtaatcaaccatttccaacagtagctccaagtcaacaaagaatgagtgttttggattcattagtgttttgggttcattagctcctgccaggccaaacccaagattgagtgagacggcaccagcagttacaatcctaaccttcccactgctaatatcctcataggttccagggactgaacacagccctcatccccattgtttctggaaatgggaaggaagacagtggtatcatctgccccagtttctccaactggttctctagcagaggcttgctaacttgagcccctaagaatacgcccttctttctcttgcccaggtccctgtcctgaaatgggtctgatctcctgccatatagacaaccagccatcagaccaatgcatagatttccttgtatgaagtttgaaccaagctggtaagtttcttcattagttcttatttttcaaaaaaagataaaaaataaagccaaaggggatcccaaagagaaggagaaaagagtaacagtaataggagctagcgcctcccacctttcaggcagcacacactacctctacaacgccagcccaatcgcttagctagcctttcccagtccactgaaacataatggaagagaaggacaaggagtgacaatttgtttggtgtctctaagattaatttgtctccgctatttaatagagatgcacagcaccaaggtcctggtgtgcaaacaggcttgcagaacgctggctgtgcagcacgcctcatacatcgctcctgggaagggaggaacgcaccagagtggggagagggcagaagagagcacgtgcgtaccagagagaagagggaaagcgaggagagagaataaaaaaaattattgctttttaatattcaaaaacagtttgcaaaatttaatcaaagcagaggaaaagctaacatttttaccactttgacatttttattagcgctttcataaatttttaaaacatgaatggaattagtttacaacacaaaaaaaaactgccctgaaaacatctggaagagacaaataggaaataataaaaaaaataaataaaagcaaaattctctgagtaaaattagcatgtggaaagggcctccactgcagagagaaaggaagggggctctgcctattcagtgaccctaatagtcagctccagcagcaccccttccccaggtccttcattctggagaagacctttccagtatcattaaaatcaaggtaaagtggttctctccagagacagcctggagaagcaacacgaaacggatgacacctgactgcacttaggaaattgatgggtgggaaaacacaaggagaaatggtcaatctccttgatgtcccaggaaagccaggtatcctcccggcaaaacatacccactaatattgggcttgtttttaaagcatctatttcaatccaacacatcaggaccgaaaaccaaatcaagtcagtcagacttcatgccagagagattcaaagattgtggttgccttgtctccgtgggctgatctccaaagatgaggaagctgacaggagcttattcccagagatagaaagggcaaaatggctgcaaggctgaggcagaggggagagaagggaggcccagactgctgcttagaccaggtaatacctctccttccaaggtgaagagagggggacactcatttcccaattccctggaccttctgttccccaagaagcattacatacagagtaaatgggggtttggaactgaataacaaaatcgaacacacaccaaaaaaatacacattggtccccctgcaaaatcaggtatccaggattccaagagccaactctgaggtgttgcccatgaatcaggctcatctgactcctgatttttccgatgtgtccttcctcttcccctaagtagaagaaacacttcctcaacagaaagagctctatagcctggtgagtatggctgccctggtgtctaaggaaacaaatacagccagctcctcactaacaatgttagctgggcccacaatgaaatttaacctgtgacacaactgtacttttcatttaaactttcatttggagagcagcagtgtttggagacctacagtttgtcctgctaataaagacaagtgttgggacctttaaggatgccattcatctttggctttttattaaattcaattttcttaagcccatgatacattatgaaattaggagttgacattcctctggaaataaaaatatctatcaaacattaatagaaaaaaaccctctattaccaagaatttatggcttaaagttgatctctttccacttttttacaagcacatggtttgttttagatatccgaaatgctattatagatctaggatttcattagtatttattataaaatagtatgtgcttcagcttccactctgaccagcaccaagtcaacatccccagcagactctctggaaacttggcctttgggtttccgcattgcagcaaataacagcaaatactgtagctcaatattcaaactttcctgatgttagcttcctcacccatagggaaatggggccaactacgtgctgaaactcagtgccatgctcccagagaggaagaacaagccagactcggatccacgcaaaaaaaaaaaaaaggaggggggtaggcccctgaaattcccagggtgcctacacccaaggctcaggacacatcaaattgggcctattataaacatatctctgataatgctagctcatcagccaagccttctccccaagaccaagaagaggtggtttcaagcaccagtctcaaaacgtgactttgcaggggcccttcctccacaacatgaggagctgttattaacaatgagcctacacactggcatattcacttgagctactgaggatgcaaaagagaagcttctgagaaaagactctctgagaaattagagcagcaaggacctcactgaggtacttcttaccatcccatattgcccagccagtacttccatacttcccagaacctcaaaatactggcccaaacagcccagtagtgggagaggtgccccaatctgcaccaagttggcacaactctgcagccagggcacctgaagcatgacaaacattttgaagatttttagctgataatgatcagagatggaaccccaacactacaggttagtggcattaatcccaacacaaagatttgtgacaatgtgcccaagtgccagcctctatgtccagttgctcagataatgaaactgttattcctgaccctgaccttttctctcagccaatttcatcattcccctaggaagaggtttatttcagaaacagttttgtgtaaaagtagcaccaggaaggaaggaaggaccagtcgtatttaccagccctctttccctatcctaataatagctttacaattctttgcctttgtatgccatttgcattcaattaaactacctgagtgcctactttgtgtaggctatcagacaggggctggagcaggactagagataagatgtagtctccactttggagaagcacatggactatgagtggaaaagataggcaaacaaagaacagtacactgtgataaataccttagtggagggacgtacacagtgttgtttttccattcacaaaagtgtagtttcacatacattttcttattttaccctccttaatcctggcagacaggttacatcatcatcaccatcaccatcttcaggtcataaatcaatactattaagcatctactattcaccaggcaggggctggctgtagacacagagatgaatacaatgaaaggtggctcctctctctgagatgctcaagtctgggcaaagggtgaagaggagctggcctccagtgctctccaagacatgtggaaaatgcaatcgttttattccatttattgtttactacgtggcagatactgtgctaataggaatgatctcatttaatcctcctaactcatgaggtgggaatcatagtcatccctatttcacaaataaactaaggcccaaagatgttaactcacttgctgacacttacactgcttgtgagggacagagctggaactccaaaatgggaaaatgagaatgagacttaagagtaggactagcagctttcaaaatatgaagggtcaagaaagatctggttctcttagtctaaaaggctatcctgtagagaactcaagtctaccatctagaaagagaggctgctctcaaattttaagagcaatgaatgtggactctccaggcagaaaagttctagagtttgctactgaaaagactccaccatggctgcagtaacacagatggcacagatggcatcagggaaggcaggaaccatgtgccttcagtgtgatctccagcacctaattcctatgctggcacacaggcttcactctctcaacttttgttgtgtaatcacatgaaagggctgctaagtggaggagacaagccaaaggcctagctgtaccagaagacacaaaactctccgcagaatcagagaggggaaatgatctgcctaagatgtcaaagatggtcagtggtacagccaggattcaaactcagatatttcacagttcaaagcactttctactagatctactctcatctctgagtggtttcctccctgaactactataaaccaccaaatcccagtcttacctagggtaatcaactgtttggttgatcaggaccaagggtttcctgcaacatagactctttttttttttttttttttttttgagacggagtctcgctctgtcgcccaggctgggttgcagtggcgagatcttggctcactgcaagctctgcctcccgggttcacgccattctcctgcctcagcctcccgagtagctgggactacaggagcccgccaccacatccggctaatttttttgtgcatttagtagagacagagtttcaccgtgttagccaggatggtctcaatctcctgacctcgtgatccacccgcttcagcctcccaaagtgttgggattacaggcgtgagccaccgcgcccggccaacatggactttcaatgctaacactgaaacaccattcacaaactacctacagcactgggctgtctgccaacggtggatgaaaactggccataacttaacagctaagaacaaaagcctcagaattgggatttttcaaatatccaaggttccaaacctattgtacctactgtctccctcaatattgtccctgtagatcttttgttgaggagagagaagacagaaataaaaatgaagcaccaaacaagcattcatctaccttgtaaaatgggttggagcagagattttaaacacagctttttttttttttttttttgagtcggagtctcactctgtcactcaggctggagtgcaatggcacaatctccggctcaatgtaacctccgcctcccgggttcaagcaattctcctgcctcagcctcccaagtagctgggattacaggcacccgtgaccacacccggctatttttgtatttttagtagagacagggtttcaccatattggccaggctggtctcaaactcctgacctcaagatccgcacgcctcggtctcccaaagtgctgggattacaggcttgagccaccacgcccggcccctggctgctctctaattgctcagctaggaacccccaatgatttccttgataaactgaggacacaactgcaacagcatttcaaatgaaatttcacacccacgatcagtagattacaagaaataaatgtgtaagttgctttcggggtattcaaactccctccaactgaagtgtctgcagaaataaaaataaatttgaagatagaataacaacaagaggatttaagcagaaggcactcaggttagactgttgggattcataaaactgggacagagggtttataaattctgtttttttgtttgtttttgagacaggatttcgctctgtcacccaggctggagtacggtggcatgatctcggctcactgcaacctccgcctcccaggttcaagtgattctcatgcctcagcctcccaagtagctgggattaccatgcccagctaatttttgtgtttttactaaagacagggttttgccacgttggccaggtgggtctcaaactcctggcctcaagagatctgtctgccttggcctcccaaagtgctgggattacaggccagagccactgcacccagcccagagggtttaatagagtagcattctagcccttttttcctaagcatagattctcctctgcctgagctgatgtttctatgtcctatctgaaataagagaatgagcagatcatttttcatggcttccccctcccaacctaggaagaaggaactggctttccttcaaaacaactaatctattccttcaaccctcggaagaaaattccaaaaagtgtgtgtccctgcactgaaaggtttgataaaatctaaaagcaacacataccacaaggtagaaaatgcagtccctggaaaacatgtgggttttacccaaatatttagttttggataaaagtctcatgcaaagacgggccctttctccaaggatcaagaagcctcctggccacagggaagagggtaagttggatgggagaagtgagggctacactgggcaatggggtatggtttgcaataacagtttctcccttggaaaaaaaaaagacattttatgcacaaggagcttatttcttaaacaaacactcgtggttttgatttacaccacagtctgctcctaaataatttatggcgggttaaatttattgccaagccctggctggctgcaaattcgaattgccaaataattagattttagggcaaagcttataaattacccgtcgatttgtccggacttgtttgtcagttgctttgtgcttcgggtcatctttggcatttggctgtttgggttttaattgctgatttacactttgacagatgagagctgatgctcgaagtttcaggacaaggaagggtaaaaaatcggagctttaaaaggctgatttttcacctacatgtccccctctccccatctccatagaccccaaagcaattaaaatatagaaaagaggctgaaaatagacactgctattctttatttgaggagagtatgggtgcaaagtgaattataatttacccttattgaaatctgaatttttcaaaaacataataccaataaatgaaggagaccaagtcttagaaaccacatcctcacctgaggtgtgcacacctgtgtctccctctgtatgtacatgactcagaaacagccacagttcaaacatttttacatattcaattgtaaataacttcagatattagtggcttctgtgaagctgacccttcaagggcaccaaacaaccaaatgatttgtttgtagctacctgtagacacacatttgtcatgaaattaatttaaacaaatctcaggttatgtgctagagaggtcccctggaggcatcactaaggaagggcctagaaatggaagggtgccaagcccaaaaaaatctctctggatagtactctggttctatcagtatgttgataagagggcctgatctctctgtgtttcccagagaagcagggcctgcctcccagtcacctgctgtatctcaacagcttattaggaggttgtggatcagaataatactagtactagttctactaataagagctaatacctataagccattacatatcaaacactgttttgagcacttaatatgtttaactcagtttatcctcccatcagtcctataagattggtactattattaaccccactttgccaataaggcaactgaggcataaagagtgcaagcaacttgcccaaggtcagactaccagtaggtagtcaagactcaaatccagacagtccagttttggaatctatgcttttaactactatgctctactgattctcatcagaacagcgtctacctcagcttccctcactttgaaggtccagagtccacattctgggacttgggcacatgcagccaaagcctgttccatcagtcacccaacaaagtggaggaaaggcatgtgtcttgctcaggatcacaagatgaatcagaggcttggttagacaaagaccatttttcaaaccaattcaaatattgccttaagatacactagctgggggtgaagaaatggcggtgagtaacaagtgatcaagacaggaccaggcccactcaggcagactgagaattctggtcagactacttggccaggagccagggaagctggctgggctacaggaggccttgctcaataatccccatccatagccccagggactgctgatctcttcacagaatactgcatgcctgtggggtggttcatagattccctgttctctgcccacaaatgatggccagcagccaggaaggtaaacagttgtgctggcatgacaatagatttttaaaaattcactgactagtaagcaagcaatacacaaacggatacccgccccccacccccgcaatgcactgaacacatttctcacacactgtcccatatgatcccacatctccgtaagcaggcaggaatcactcccctgttttgcagatgagaaagctaagagggtcagctgttgtcaaaccagtcccatcacttgagaacttgttagaaatgcaaatttctggcctccacccttgcctttcagaatcagaagccctggggatggggccaacagccttggttttaacagccctccaggtgactctgacgctcgctgaagtctgaagtttgagaaccgctggtccagactacagcagtgtttctcagacttcaaatgacctgaggaatgtgtcagattgcaggttctatttcagtatatttagtatattcagattatatttcagtatattctatttcagtagggccggcatgacattctgcatttctaacaagctcccaggtgatgaggatgctgctggttctcagaccacaatttaaacagcaaaggtgtagtctagaacatttatgtgactaactccttatcgctgaggtactgaccaaatgagaatcagagcccatggctctcagctcccttctcagagcaaacccttacttgacccactttaagcacccgagtcaagccctctaagtctgctaaccatcgctagctcttatcaccagacatttcatcctccttgctgccaagagctagggcagaaaaacaggcctgtcacatccaagaacttcacagagtagactggcacatctctgtcagggagctagcaaaaagtcttcttgtcatggcagtgcctgcttcctttaggaatactgtcaagaccagggcatcagctaccctcagagtgctcagcacactattgtctcagccctccagaaaaaaaccttcctctgtccagatgaaccaaaaagcaggactgggtacctctcctatgagaagaccgctcattacagacacaagccaggagcttatctggtctatctaactgcctctggtcctgagaaaggcctctccaaccctggccacaaatttggagcaggatcacagaattcctgcatatcctaaggcacctacttggggactccttgctatcctcaccagccaccacattcaacaccatcaaccatgaatttcctttcaggtctgcccccgacattgtttctctagtcacattacctttccagtgaaagtagacctgatcaaaatgccatgtttcatctcactcatcagccctacccacccatctgtaactaccaatcccgttcagttgaccagctggcctttaaaatgccgctagtgttgtgaacaacgcagacatgtccctgcatttccagacaatgcaatctcaaatcatggctctcagttttatcacacttttagagagcaagattccaagctttctagccagttattatcctatctacctaaccatcactacctacctcctctaggccaatggccaaacaatgcatcaaataggtcctagaggaataactacccacattaccactaaggaactcaactataacagctctgcctgttatgttctccctgatacggatcttctactcagagtaccccatttacaacaactatagattccatgcgccactccttaacaaacctcagtaccactgactcctcagtaggccactagtctccaaaagagttatgagctacataagaacatggttctcaagcctgtttccttcctagcacacctaagggttacaacatgtaacttctccccattctcaccatcgccaaccaactaacatcctagtccaacccactagcatctctctcaagtactgcatccgtaccagtctcccaacatacatttttaacctcttggaacaacttcctttccattcccatggactctggcttataacatctatttctgtttcttcttttccactcagtaatacattcaaatttccttttccggctccccaactgtacccccattgtagagtatgaacactcctttactttcagcaacgtcggcatctccaaataagtgcctctgccagcacctaaccctcagatcagcccttggctggaatggccttccaggactagacactgactatacactacaacagaagtagagccacttgtgtatcagacctgttttgccacccacaggccttccagatctccttactggccaactacatgcagggacaggacccaaacagcagcctatcccaaggcacctctacatccaaataaaagctgccctgatgtttgtctctccctccagatttcttctttctgatttacttcctttctgactctcccaacacctaacagggttttgtccgtggcaggagcatcaatacatataaacgcttttctgcctgtgccagcctgttcacccttctgctgcagacctgccagcctttgctgggggtgggggtagctggtgtcaatgtgggtacactcttgtttcaggcttttaggctatggctcaattttcacagctagagctcaaaactcatcacataaatgtaagaatgtgggggttttttaagtatcgtgaacacccaggataagaggataaaaaataatcatcccaatggcatcttaatcaaaatgatgcaagatcctttttcccaatgagatacagagatgcagaaagggtctcctgatatcagtttcctcatgtcaaacaatggagatcagtctacaaaagaaatataatcaagaggggagaggaaaagcagggcaggatggaggtagggagaagtgaagcctatggacttaacctaaacactcttggatttcacttcccccactgtccccgctttccaacctgctggctttgctttctatggctgtacctgttgccaatgctcagaggaagctcagcctccacccccatgccctccagtcgcttctgatcccaccaatctccacattacccagaccttcctgcctcttcatcagtcattccttccacactaatctcaatgttagtcagccagctatttatctttttgaagggtctaaacctccctggtctattgaaggtaggtcctagcagatccagatccaaattcccaatttttttttttttttaagcagggggaaggtgaaggggaggcgtcatgtcattccccagcctttgactctccctagagacctagcagcccacccaaatgctatgctgaggtatcagcctcctgataatgcctcagagccttagccttcttgacaatacctcagagccttagcttacaccatatccactttcacccacaccccttttacccacactttattgggtaaaatgctcttaagcctcttctagcctttgtacttccacttatagcatcacaatgacaccttctagctcgaatgtgagaaacagcgtaaaactgatatagataatccaactaactgaacagtgaaatacttgccaggttcaaagtctttattctccttttacctcattttcaatatttctacaaacaagcctgtaatcaaggtcagtttttccagacttaggccatttcattctggcttactgtgtgaaccccttcttctcttcctgctataacagttctgaatggcctcaggtccacttggccctttctggtctcctgaatttcttataacatgaaaactatgcagccctcccccacactgtgagcagggttgatcattcccatcctttgtgcccccactgtaccaagtacttaccatgtcatggtggttatcatacagcctaatggttgttacacaaatgtctgccctccttgactatgagctccttgagggtagggaccattccttacttgtctttatacccctagcatctaacacagagctttaagttactatccaaagagtaaaaagaagccttttcattgcctctaaggtggttataatgaggtcttccccattcctttgctgacttaggcggtttttttatgtccaacaaaaactttaaaaggcagctcagtgtcactgttattttacggtccctgatttcactcaccatttatcaatggccctattctttagagctcttccccaccaccaaccttagcccagtgcccaaaaaaatctgcattccaacagctatctcagccctggggaggccatcaggataataagaggctaggggggatgtttcctgatttgcactaaattatgtggtgattttgttaccagtgacccagtgttccccaaggaaagttcctggccccacccccagacaactccacagcctgctacacaccatggcagcttaaaggtataaaccctggggaaggtggagaagcagtctgaatagagcaaataaaccgcttcgatcctgcctctgctatgccaaacacacaagccagggccaccatgcatcagtgctccattccccgagatgtatattttgcttctacattgctatgtctgctccaaatacagacaggcccttcggctttcacgtgaagttgcaatacagccaagactcggacacagcaaacgcttgttcccattccgggaatactagtgaggagccatagtgggagccaggcggaggcccatccttatgagggaccaccaggaaacagcagcctgtggaggaagatggctttggaaggaggaggggcaaggaccacatttatggaggcagtgacaaaaaagacaaaggggcctagtgggccaccccattcccaccatcactggccatcaatagaggaattcatttatagtgaccctgaaagaagagatgtgttaaagtagagatataactagaaagaaaggcaataattgctctgatgggcaggggaaaaattattccaggagtcgggagcctgtacaagaacacttacagctcacacagtcatcataactcagccccctcaagcattttgtgctctgcttatggtgttaactttaatgtcttaacatataacaccatccacactaacacaaaatactacacacgccagatgaggctaagttatagttgctgtgggaagcataactttgaatttcctgattttggtgcatttaatctcaaccataatgttacattaacgtcggttttgcatttcattttccagtttagaagaatagcgtcagcgccttcgcctgtctgtacagaaaaaagtacatgctgactggggccacagacagagggaccacaatccaaggattaggctctccaggaaaaaggcctgggccccatccctccccactggaggagctacaaccaggacaagcacatgggaagggaagggtgggttctttctccagggaattgcttttctgtccacttagtcacggcaggaaccaagaacagagagaaggaaagaagctaaacatggggcaaagagcaatgtgttgggcagggcggggaggcagcacgtggggttaagaggattcctgcctttcagcctcgaacgaaggagaaagaaatcaatatagtttgctttgtagggatcttaaccaatttcctgtaaagttttccaaaatgtctctttcacaaaagactagtaatgatgtggcaactctaggtcacacggaaaccctccgaatctcttctacattagccatctctgttaccaccaaccctccccacatatccttcaaaaataacagcacctggacaattgtctggaaacgagaaactcctttactcatagttctaactcaaaatgcagatggactctcttcaaggtttccgtaaaaaggaaaaaaatgctcctgtggacaaagaccaaacactagaaacctcaaccccaaacgtcatttttctccaaagttatgggcacttgaatacagatgagaaggcaaacagtcagtagggctgctgcagagcagagacaaaaagactatgcaggagcctgacggatggccagaggacttggggaggaaagtgggtagccgccaggatggcagctcctcggatggggagagctgtgctgcaccctccctccctggtcatccagacagctgaggttacctcctcctcccaacgtgctgtggcctatacctcattttcctcacttacatttgctttggtctcttctgaacactgaggtggtgagtgaacttgccccaaggttaaagatgcacaattaaagatcccaccaaagctttcaggctgctctctgggcctcagggtcacaacaaccatcactcggtgcacatccacaccaaaatgagcaaaatgaactcctgctagcgaggacaaaggaggcataattctcctaaaccagataaaaaactgcttctatgtcaggaaacaattcctaaaacaagaaaggagccacattcctgaaatttggaccctctaaaacattttaaaccatctaaattacatttaagtgaaaaaagtgttttcaaatgaaaaagtctcctattcaaccaatacctatcatgttaatctgaatcaaaacatgtaacacaaataaaatgagtgcaaaaaccagaacaccaaagcctgtaactggcaagccaaccactccagtttcacctagctgaataaagtacaaaaataaacagcaaaactgatgacaaatggaaaatatcatgttttaccatgtttataaccaatgctgttactcacccaagtacaacagggcttacacctgttagtttttcgtgatggcattcctttaagatagtcccaataagctgactcaactaactcaggaacttctggaaatcaaagatagataaaagagccccacattaagcctccaaataggccatggcctaaaactgtttctgcctcctatatactcaaggggtatgacacactgtcataaaaacagaagtgtaccatgcaggatcttgagtactgaaagttcctgctggctgtggtggctcacacctgtaatcagagcactttaggaggccgaggtggaagtatcatttgaacccaggagtttgaaaccagcctgggcaacatagtgagaccccatcattataaaaaataaacagaaaattagccaggcatgatggagcatacccatagtcccagctacttggtaggctaagatgggaggatcgcttgagcccaggaggttgaggctgaaggttgaggctgcactgagctgtgatcacacactgcactccagcctgggcaacggagcaagactctgtctcaaaaaaaaaaaaacaaacaaaaaacagaaaagggagctggtcaggagaggagcctggatggttctcattcataagcccagccctactcccaggaggcatgcagaccttactcataaagaatcaggccgggggcagtggctcatgcctgtaatcccagaactttgggaggctgaggcgggtggatcacctgaggtggggagttcaagaccagcctgaccaacatggagaaagccgacctccactaaaaatacaaaattagctgggcatggtggcgcatgcctgtaatcctggctactcgggaagctgaggcaggaaaattgcttgaggcagaggttgcggtgagccgagatcacaccattgcactccagcctgggcaacaagagcaacttgtagcctgggcaacaagagcgaaactccatctcaaaaaaaaaaaaaaaaaagaatcaaagaatctctgtcaaatggacagccatcaagccgttctgagacagcactaaggaaggctgatctaaggtgtataccttattccggtccttttgctgtctcttctggcagttcattctcatcccaaatctcaacctttcctgcttccatttaaacttctttcttttttgtccctattaaaatcaagagcaagttgttatcgtactccttggaataattactcctcacatgatgaatttattcagtctgaacaagaaatcagtcaccaaaactataatcaatttattttctaagttctatttttgtgcctctaatgatttgtggtccaattcctgagcttttccaatttctccacttcccttgttgaccagaagacctaaacagcacaggggctctaataagaaccggacctatgttgacctcaatggaaggatgctattctatctaggactgacaacttctccaatccgtcttcttggctttctctgaatcccatcaggatcctgctacctgcaaaccttaaaaaagctctcccataaaaaagggagattttaagttgctactaacaagtttcaacctgccgtccctttcctgaaggtggtctgatgggtagtccaacacagatgtctggccccaaactcaccttcccaactgttgatcacagcattgtagaggtttaatgaagtcaagatgcattacatttatcacttgccctagatccactcaaatccatcactatgtcacagcaagaagttaagattgatctgacaggatttgctcttcttcacaaacccatgtaagttattactcagtgccccacgctcttctagctgtttgctgattgattatctgacgatcaggtcaagtatcttctctggaatcacagtaaactaacgggtctataatttccaagatcattcgtattctccttttaaagataagcaagacagcaaatgcttcttcccgagttctctaaagcaacagctaatgctttgctaataatgaaccagggcagccaattccttaagtgcccttggaatcacatcatcagggttcattgattctggagataatctttaatcaggcccagaccctggtaaacaatgtgaagccctaactcagcctgggtctggaaggtcttggtgcctaagtctgggaaggaagttggtgatacaagctgtttaaatctgtactgcatgatgtcttcagcattgtgataaataaataagtaaaaataaagcccttgaaagaaagatgaaaggtgacattgacagaccaaactgagacatgattcaggcttcaccttcaggaatattggcaggaccctctgcaggacaagaaaacagagctacataattatctgagtttataatctaactgaaaaggtaagaaaatacacatatataagcatatgccagaaagcagtaaatgccataacagaggtgccaagcgattatgagggatcagaagagggatgaatcatatgtgacagagatgtgttagattttagtctcatgtcccactagggcttacccagtgactgaaatagaagaaataatatgacatattaagatttggatccctaattcccaacatgggagaatcttaataaccaaaattcccagcataagcaccagctgccctcaccacaccagagaaaatccagtagtttggggaggcatggaagaagactacagtataggcaggagccagaggcagagaacgtaagtgtggcttgagtagctcccaagctgcattcccttacacccaaaggaccttcctttaggatattctccttatccagctcctgggttcccagccctcagtaggcctcattccagtgcctcaaaggcagaccaatgcattaagggagtataggaaagaggagaggagaaagggaacactagaggttgtcatacctgctttatgtaaaataatttaccattttgaagacagatcccttcctgaaaaaaccaaccatgacagacaaacccagtttatctttaaatggaccacactcctccctaccttcgaagtgcccgatgctgaggtccccttctctccctcctccttacgattgaaagctgttcccagagcaacatgtctatgcatcacacactctataacctaaccctatagagaagagttacagtcctagagccagacatattcaatgcaccaacactacaatgaactgctacatcagcccccaatcattccctcaaagcaaacaccacatacttcaatatcacctgcagctaatccaagcctcctagcagcattaacttaaaagctaaaaggtctttgaacacagctggtgactaatgaaaaaaagcaagcaaagaaattgtcctttccaacagaccaacaatggtacttgctcaggttatctaatgctgcataacaaatcatcccaaaacctgtggcttaaaacatcaataatcatttgttatccctcacagttcctgtgagtcaggaatttgagagtggcttagctggctggtctggctcaaagtccctcctaaggttgaagtcacatgtccaccggggctgcagtcatctgaaggcctgaccggggctggtagattcacttctaagatagctcattctcatgactggcaagttgggcactggattttggctaagagcctcagttcctacacacatgtgcctctccacagggctgcttgagtgtcctggcagcatgacagctggcttcccccagagcaagtggtccaaaagagcaaagtggactgcaatactttttataacttaccctcagaagtcgtacattatctcttccactgtattctattagctatacaggaatatctttgattcagtgcaggaggggaactaccaagggtgtgaatagcaggagttaagaatcattgaggtcatcttggaggccagctactatagcactccttaaaggaacaagtggcagtagcaggagaatggaggaaagaagagaacagagaaaggaaggacgggagaaggaaatattttgattcccaaaagctgagactagagagaaacaatgtacccagttctctccagagacttctcaggtctaccttacactagcatacctgaaacaagtcctgcttcctagacaggaactctaaatgagtagctaaaagacaggaaggcatgagaaagctcctttgtgtcccaggaagcaaaactatcctccctccctccttgccccccccaccttttctaaagcaatgatggaacagttacctgaggatgaatctgtggcttgtcgcacgtggcctcaaagtccagcactaaaaagtagtgatacctctggggagggaaggacaccattgccgccatggatgcgccaaagccgtgggccgccagctttctggtggatatggagcagaactccggaacaccacagggagaaaataagtgggagcccagcacttttcttgctcttgaaagtaaatacgaagaaaatcgagctgctccagtctgtaaaggtgctagcattgaacatccagaagcatctaaaacttaggggaggaaagtttaaaaaaaaaaaaaaaaaagaaaagaaagaaaaaaaaaaaaagaacagagagcctgggttactccctcccactgtggccctgttccatctagtcttcaggaatatccacgcaacatgggccactccccagtgtttctgggccccttttctaaatcatagtattcgttactaaagttcaagaccctaatagcagcacctgcagcattattacagctctgagtctcccagatcattctcaaaacaacatgcaacactggcctgcatctttaaatggagctctaaagttcaaaagagagaagagagaaaaattgtgcagtcacttctcaggtggcaacagttaacattaaagctatgggtccaaagtaacgtgaggtgaccctgttgtacaatgagtcctggaagctaagtagactcagacaagcagcagaaaatgtccaaggttcttttctcagctccactaggagccatttgcccctggctttccagtctgtatcttgatgtctccacataccctcctcccctctcccaaggtgaaggcaaacaaagcgaatcacaggggtttgctctgacattctggtgatcccccaacccccacactagtaagtggcaccctgggggaatgaacagtgcctggagagcacagctggctgcagccttaggccttctcatttgctgccttagactcggtctctactcgaggccctgaatgactgcgggactttttaaatagggaagaaaaagaaaacccagatgtggcagtaataggaacatggctaaaagtctagtaaagttttctgagtgaacatgtgcaaaaaaaaaaaaaaaaaaatcaaatcacttttcctttaagttttccccttaaatttgcagaatgcctgctcctcagaggcctaactaaatacaaaaatcaaagcctaagttttactcacgaataactcaaacttccttaaaaagaaaaaaggaacaaagcagaaatgttgtctttctccctttaatactcaacattcaaatttctctcaactttaatcctcaaataagaaatctcactgtacaatacagtaatggccatagtttgtgctttccgaagcctcattccaacacaaccaaaggcttgcctctgatggctgcaagtgggcacctggctcccttcacatagggtagagggatagcaccctgtgaagtccagcgcgtactcaaaggcaatgaggccactaccacctgaacagaagcagataatgccaagtatggctgtcttcccatctctctcctgactcactgaatgagctacagtaacttgcctatatatatagtaggatatacgctagtgtaggtcctcaatttccctatccctataatgagatttcagggggattcagtggagctaagaccaaaaaatattttaagttcttcatggatcctgcacaagcacagcacttgttttcaccactgctttatagcctcaccaaaaatacagccaaaactcagcccaggtagacaaacgctggcttgagtttcaatatggagtctcctggaagggcaagagggccaatatccctttgaaagccagaatcttctcatcgcctattcctgaatagtactggaagccttaatgagatggaagacaccagtctgctcaaattacccattctagtttggatccaaagtccctcaaggacttagactcttctctaaccccataaaaaagtgtaaagacttctgaaagtcctaatgttctacagtgtgcacagaatatgcgtagtatatacagtcagtcaatcctgtctaccaaatactataagcaattaagcatgatgagtaaggagggcttccaagtttgaatcctagctttaccacttactacccatggcaccttgggcatgctgtgttcttcaattcctcatctgtaaaatgacaataacaatagcacctactccttaagtgagaacaaaatgagacaacacatgtaaagcactaagaccagtgcctggcatataacagcctaatatatattatcctaatgttattactactatcctattgggctatgcccacctggccaagcctggatccccagattctgggcctacaaatccaattaattcataaggcagcctcagagagtaatatcgatgtcttctgcaaccctaaaatgctccagacctctgacagagcatactatatataccctattctgatggccagtggtcctcttgcctgcaggccttgctttctcacctgatttcatctacatcaaaaagcttcttttggccaagcacagtgactgcacctgtaatcccagcactgtgggaggctgaggcagaagtattgcttgagcccaggagttcgaaaccagcctgggaaacatagtgagacccaatctctacaaaaaataaattaaaaattagccaggcggggtgctgcatgcctgtagtcccagctacttggtaggctgaagtaggaagatcacttgagcccaggaggttgaggctacagtgagctgtgatggagccactgcactccagtctgggtgacagagcaagaccataattcaaaaacaaaacaaaacaaaacaaaacaaaaaaacttctctcgtaggaagtcttgagagtagacattaggaggtcaggcctccacatatcagcagttactggattccacacttcccttacttctaacaaccaagctcagttcaagtcaagaaacagagggtagctcttcctcttcccttcctgaaaaactcaatcctaaagccattaggtgcagcagaagagggcagatatctacaacgggtggagtagggtgagccagagaggtctgggggacactgtcagagcccaggcagggtgaggaagacatccttgcagaagtgggaaggtgtggtgcagcatgtcagagccgagggggatgtggagagcatccatgtcggctggcagtctgatgtggggtgacacacgcagggtaaaagaggcactcatgaagggtaaagggcagtggcagtaatgaggattagctacctacagaggaactgatcaaagaagtgcatatattaagcataatgggacccaggtttctcactgttaagagaaaggagttaaaatatggaaagggagaaaatctgtggtgttggattggaattggcaggaagaatgtgaactcatggtttctgattagatgtgtatcagatagatagatggatacacacacacacacaaatatacacacatatgcatatatattttctagctctatttaaggaagagccagggagcagtaacaatggcaatgagcacacctagcactccattgccttcttgttttttttttgaagacagggtcttgctctgttgcccaggctgcagtgcagcggcacaatcatagctcactgcagcctcgaactcccacgctcaagcaatcttcccacttcagcctcccaagtagcttggaccacaggcatgtgccaccacatccagctaatatatatatatatatatatatatatatatatatatatatatatatttttttttttttttttttttttttttttttgtagagataagagtctcactacgttgcccaggctggtcttaaattcctaggctcaaatgttcttcccaccttggcatcccaaagtgctgggattacaggcatgggccacagcacccagccccagttgccttctaaataccattccccactaaaagaaacagaggtccttagagaaatggctgattccagggatgcagcaagagaaatacaagatgagcgcataacatcttgtatcagaaagcaaggaaacacccaaataatgatgggaacataccaaaaggatacagaagccacccactggccaagaaacaatgatagtaatggattataatgcactgaatagaaaaccatgagtccataaagatataaatcaataaaattaaactttgatgtgagatatttacatagtttcaaagtatcaccccacaaaatacttattaattacaactagtagtaattttatgatggagaagcctggcagacatcaccttaatcaagtgatcaaagtgaacattatcaataatgggataaatcaaaatcacacgacgagaagaacaaagcatcatttctgttatattcctgaagctacacaacctaaatctaatcatgagaaaatgtcacacaaaccctaattgagagacaatctaaacaataaccagcctgtaatcttcaaaagtatcaaggtcatgaatgccaaggaacgtttactgaggaaagtctaaaggagactagagacttgataaccaaatgcaacccacgattctgaactggatcactttgctgcaaagaacattcctaggacaactggcaaaactttaatggggtccaaggtttatatagaggttttatatcaatgttaatttcctgattttgatggttgtattttgactaggtaggaaaatgtccttgtttataggaaatgcacaccaagcattcagggtgatggggcattaggtcggcaacttaaccctcaaatggttcagggaaaaaattctttctactgtacttacaacttttatgtaaatttgggctgtttcaaacgtttttttaaaattgttttttaaaatcagctgggtggggtggctcacatctgtaatcccagcactctgggaggccaaggcaggcagatcgcttgaggtcaggagttcaagaccagcctgggcaacatggcaaaaccccatctctactaaaaatacaaaaattagccaggcatggtagcacacccctgtaatccagtgactcagggggctgaggcaggagaatcgcttgaacctaggaggcagggtttgcagtgaactgagatcacatcactacactccagcctgggtgacagagactccatctcaataaataaataaataaataaataaataaataaataaataaataaaattgttttttaaaatccatgtgcaatgtggttacaattttaaaattaaaaatatcacacagacagtatttgaagagacagatctccctgtaatgcccacagaaggtaggctgcatgttctctctggtagagaggctcaaagcatctctcagcccaaacagtatctctatccagccgagtttccatcagaagagcccctactcaatgcccacttcactggcactcctgctaccatacagccttctcaggaaacacacctgctccctgcagcagcatcccacttgcccttgcaccctccggtgtcttagggatttctcttttctattgatgtctttatgttttagtcacaaatttgcaggctataagtctatagcttataatatcaactgggactttgagtatctaaatgagggccagaactcaaaagaaagtttatgattctgcctatttctgcaaactatctttcatcagagactaagatttatacacatttattctcagacatccttttccgtctcctagcaaattaaaggtattaagtagcccatggcaaggaggaaaatgaatgattctctcctcaatatgaagggcccaggtccccagtggggacaggggaggggtaaatgggactgccacggggccagcccgatttggagaagcaggcctgcgccagagcccctggaggatggtctctgtgcagagtatttacacaacagacaccaatggctcctctgcagccattactgtctatcaggtaaataacacatgtgccaaaacacacatttaatgagggaaataatatgcctttataaaaagactcaatctgtatttacctgagagaccaaagaagcaccaaatcaccagattagaggaaccacagaggagtcgttctggtgtcttgggtaaatagacattttatagcctccattactggaggggtgagcagagggggtcaacctttaacatccacacacacaggccaagggagtcctcaggatgggaaaacaagaggaggccactgtgaaacaggtggtctactcccacttccacctccccagccacatgtacttgggatctctgggatggtgtatgtttataccacccctggattcaattcattccattaaaagccagactaggaggcagggatacatccaagtaactccaagttacctgcaacaggttctgagtccagctgactgaaagcacctaggaatacaacaatcatagcttcctcagttctcagtcctggtgtaagtccccaacccaatctgacctgcagtatcacaagtgctcaggcacctgagtcacagaaacaacaacaaaaaacacagtaatacctgtctggaactcagtcactggctttgtctcaagcagctaaaaatagcctgggaaaaaatacaaataaactgcatcccttcaaaagtcataatcttcaatctaatgaatatatccttactgccagagcactctctgtgtgaaaaacaaactgtcaaaggtgaaagaaaacctaagaggcaacacagtccaaccagccagggaaaatgagattagaaagagaaaaggactgcccaaggttcacactgcaagaaatagtaagaatagaacccaggctctcaactccaaggccagggtctcaggctactgctccaacacaaggaaaaggcctcactagtcatttcccaagctatgcagtctcacagaagaggccaagagcctgaggactctgtctagtttgttgaaggctagaggttgaagacaaaacaaagcttgacatgccctggaagctccacatggtcccaatgcggaaaggaagcaggaactctaaaactgagtcctcacctcaacaaaacagtctcctcttctctacactcagtccctgccttggcctgtagctacagctgcttctgctccaaggcacagctatggagagctcccccaactcagaagcagctgctaataatcccaaactaccagcagagctaaaatcactaaagatcttcaggaacaccaaattctgagggcaacatcataggtcacagcaggcttgctctccccttcaactggtctgtttcagcagctccaagaaacacataaaaagaggcaattgtttgtgatttgcctgctgtttgctaacccagcagccatgcccagtagcttgggcaaactcctttcagcggccaaagcttgaagacatctttttgcaaagtcctgcaagtcagttgcaacctcatcacacacgagaaggggcaaagccttgcttcctaacacaccataaatagactagagatggatggagggcagggtatggtagcatcatccctttaagcacctctcacatttgtagacagcatctgatcccagaagagaggtacccagaactgttaaatacttcctatactcctggtcccaagatggggaactgctgtaaaagcaaggagttatataatctagtgttaaaacactggtaatagacaaacctaggttcaaatcctgactctactacaaattatttgtaataatagctataataataataatacctatgtctttgggattcaattcaaccgtgcgatgtacaaaaagtgctttgcacaatagcaagcgctcaataaaagggagctgttactacatgagaaagagaaaaagcaaacacccttttctgaaaatctactccaagccaggcattgtatcgatgatttacatattttatttaatcctcccaagtatcaagcagaatgggtaagaatattcgcatatcacacatgaggaaactaagggctcggaggtgctcagctctttggggccctgttctctaccacgtgtgatggcccacatttccccacatgactgattccctccatccgacagaggaccaacaatgcatatcaactgcagtttttcttttgaggcaaagtgtaactttaactaaaagtaactcaaccttaagcaataattaagtctatccaaatcatcctaactagttttcatatttttttatatttaaaaagaaaaattacaggcctgagcacaagagcagaattaaaagaacggcagcacaaggaactcgaagtctcttctcaaacaaaattccacaggagcaaatctttccatcttacagagtggaaactggcaggaggcagggttataaccaattcttactcaagtacccaaatgtgacgtttccttttacaaatttgtgctttggcaaacgctgctccctattttggaatgcacttccattttttgccagacaaattatgactccttccttaaaatccagctcaaatctccccccttttggtggctttctctgacactccatcataaagctaattgtttaagtatgatccagtggcacagtttattcctacttcataacttttatctcactatgttgtaagatattaggtatgtttcttctactaccagtaattttcaaagagttaaggaagaaggatagaagacagcagtataggtgaatgtgtgcatgtgttaaaaaaaaaaaaagcatatttgacataattctttgacttgcttgttagactaatgcatttcaaaatttcaaatagcattaaagaagagcatgagattgttttgttgtgtgtgtgtgtgtgtgtgtgtgtgttttaatctaaactgtgctaagtctcagagtttttaaagcctgagaaacactgagctagatccctaagggtaaggaccacattttattcctctgtattcccagcacccagcacaggaccaggcacaaagtaagcaagagtaaatgtttgctaaatgaattaatatgcccacagtcatgatgccaactgctctggaattagaacatgctaattagaacagagcagggcctaagcagcaaacaaagcttcttctcttcctttctttatccttcctcctagcccaccccattctgtcctccctagttaaaaagagcgaaaaagagtgaaagaaagagtgagagacacagagagacagacagggagagagagaattgccttggtgccggaataccattaaaaggattaatttagggaccagtgtttggactgtcacatccaatcactacccacagatctacagcttcccaaatcaggctcatgcaaagaggaatcaattgcaaggacacagagggtctgaacaggcatactaatggcctcctgaggtgccagcggccagctctgacactcccataaattatccgccttttgattttacctgtagctgtggggcacaaggcacaattttgaacacatcaaagcaatccctggtaacccaaggctcctcaaggaatgtccccaaagaggaaagcctaaaaacaatgatccaaaagggagtctgcttcccaacagttctggttctagcaatcattaattaaaacccaacagaaccaaatggataatgtgggacccaaatcaaacctagtagatctggacacggcatgcatcagactgcagttctgcaatgactatgcacctctcactcaaggaaagtgaaatcacagcaataaactaacacactttcatctggatggcaaatctgccctagctttgacagtacctcgcagcaggacctcaggcaactcatttaacctttctaggcctcagtttcttcatatggtatcaaggacaagaatgctgaccacctgacccacttcccagagtgctggtgaaaagtaattttaaaaaatttgagaggcactttacaaagatgtaaggccacagggtatcaacactaataaatgaccccagacagacagggaggaatgctggtcacactttggtgaatttctatcgggaagctgctcactcgatttgctttactgatggtgttgggactaaggtccacactgaaaaaagttctgggattgttttttgttgttttgtcttgagatggagtctcactctgtcacccaggctggagtgcagtggctcgatctcagctcattgcaacctccacctcccgggttcaagcaattatcctgcctcagcctcctcaatagctgggactacaggtgtgtgccaccatgcctggctaattttttgtatttttgtagagatggggtttcaccatgttggccaggctggtctcaaactcctgacctcctgacctcaggtgatccacccgccttgacctcccaaagtgttgggattacaggtgtgagccaccacgcctggccagttctgggattctaaatgaacacccattgtctgaaaattttccattatgaaaagcagtgccttgctttagttgtaaattcctcctgtctgctggctgccaccacaagcagctatctttttagcatatgttcacaacgacaactgtgaggacacaaaaaatatgaagccaaaagccaagtcacccaaatactggctgctttttaaaaacttattaattatataaaatttgattagtgataaaagttatcaagacactgtgcaaagagttttacattattaaatccttcagccaactcgattgtctcattatctccattttacagatagcaaagtgaagcccagagaggaaggcacttgcccaaggtcacataaacactgctatcagaaacctacactagggcttgtaggatgaagacctcctacaaaagaaaagtaggaagaaagggaaagtgcagacatgggaccctcagctctaacctattcatcagacgctcaccaaatacaatactttatttggtccctgtccttgacatataccatcatacctgaactaggagacatctccaaaatgtctggaagaggccatcagtcttctacaagcaaggaaaggagaaaccaaataggacatatatagaatgaggacaatttcctggaaagcttaggaaaatgggtcatcctctgtgtgtacagttcaagaagttcgaattaattgacaataagctatgagccctaagaccaagactccttccagggctccgtttattccatacttcattaaaatatagtttccaaaggattttaatcttttttttttttttgagacagagtctcgctctgttgcccaggctggagtaaagtggcacaatctcggctcactgcaacctccacttcccaggttcaagtgattctcatgcctcagcctcccaagtagctgggattacaggcacatgccaccacacccagctaatttttatatttttagtagaaacggggtttcgccatgttggccaggctggtctcaaactcctggcctcaagtgatccacccacctcggcctcccaaagtgctgggattatgagcatgagccaccgtgcccagctctttcaattcattttataccatctttccctttctacatcttttccagtctgtaaaatagaagccagtatctccaacaaattctttggtagacattctagtagatgggtaggaagttagtaaagagaactgttatatatgcaaagattcagttatactcttttttttatttataagaaaagcgtatttatagatcagttttgttgtttttggtttttttgtagagttgggtctcagtatcttgaccaggttggtcccaatttcctgcctcaagcctcagcctcccaaagtgctgagattataggcacgagccatcgtgcccagccatatactcaatttttaaggaccaaaataatgccacagaagataaaaataaaatgctatccacgtaattgccacagcctcctgactagtcctgctgcttccagtatcatctgtccccttcaatccatttttcacaatgaaatcagagcaaactttttttttttttttgagacagagtcttgctctgtcacccaggctggagtgcagtggtgccatctcagctcactgcaacctccgccttctgggttcaagcaattctcccgcctcagcctcccaagtagctgggattatagatgtgcaccaccatgcccagctaatttttgtgtttttagtagagacagggtttcaacatgttggccaggctggtctcaaactcctgacgtcaagtgatctgcccacctcagcttcccaaagtgctgggattacaggcgtgagccaccatgccggcctgccaactttctaaaacataaatctaatgtcagtctactgcttaaaaccctttaatggcttcttactgttcttaaatctgatccagaggtcagcaaactatgtcccatgggccaaatctaactgtcacctttattttataaataaagttttacaggaatacatccatgctcttccttttcatactgtctgtggctactttcatgcataactgcagagtttagtagagttgagaagttgtgacagagacccaaagcctaaatatttactatcttatccattacagaaaaaatttgcagagcactaatctaatcttttttctactccctggtctaatcctaagagtttataaggctaaggctctggcctctgcttagctcctgcttcatctctccccatatcctcctgtcccctgaccactaagtactctgtttcagccacattgaactttctcaaattcaacaaagctctgacacttggtccctcatgtcttcacctaattttttttttttaatttcccgtgttctttgagggttcgtttaattctatgtgaggaggtttacttcctctgagaggccttccctgagtctacaagtctgggttagagacctttctgagtattcccaaagcctctacacttcccttactatagcactctcagatcatatcataactgcctttttactatcagtctctcccatgaatttgtaagctctatggtgtcagggaaggtggctttcttgttcaccactacaatcccaggaactagcacagtgcctggcccttagctattgaacaaacaagctcgagtccctggatatcaatcatccagagtatgcctctttagctggtccctgatccttgtaaaacagacaggttggaactaaccacccaccaaaaggtgacatgcaacctaaattaaaccaagatcccaaaggccttggtcaaatacattagcaaaagccaaacgagagccaggtgtagtggcacatgcctgtagctccagctacttgtgggcaggagatcacttgaacccaggagttcgagcccagcatgggcaacctagcaaggtctcatagatagatagatagatagatagatagatagatagatagatagatagatagatagataaatgtttaaagccaaatgaagatgtttcttcctattttcttaagatgtgtatttctcaggataatgggctattctggttctattcaaccatcctgaacctaaagtaggtgctcatgagatgcccataaagcagttgtgacagaacttgacagtctggatctcccacctccaactcttaccactttagaaactttaagtaagtttctacagactttgagcatatgttactttatcagaagaagctacaaaaaaatatgattcgtttagactttggggatacatgggaaaaaaaatacaatctgcatcagcccccaccccctaccctccaagcccaaatactcagaagaaaataaagccagacttgaccatgcaacaggattctcacctctccttacttcgaagatgccaagaccggcagctggggatgctgaaggttctgtgagagctggaaagccccaatgctgtggataaatacacatctctgcaacaagtctatttcaataccaaggatcaaatccccatgaaggatactacacctcaaactctaaactcaaacttcgggataactgctatctatgtgcaaagacagtgcccccacagagctttcagaaactattagtactacatttgtaatgattttcatgttctctagtcatatacttttgctcctaaggaggctcacctcctagaaacactaaacatttaccgagaaagatagctatgaagtggtgcctctgggtagtttcagaatcctagtctagtcaaggaggaagacactggtaaggctgacaatattcagaactaaggaactaaggctgggccaggactggggtaggggttggttgccacaaatccacaagccatactgaaaatggccacatagactaggaaacactttcaggatagttccaagcctgcttcaagctctaagaaagtcaaggtaactaaatcccaagtcaaaacatcaatagatacctatcatccttttcaactaattcatatcctccaaaggaccagaagttgcagagatgcccctgttagtgatgtcttttgcataaagaaacacctagggttggaactaatatattcctgtctaccattccacacatttaagactttcttctactcagatcccctgggaaaaggccactcaccaatttaccccaccacaaagaaaacactttttaaaatgaaagggaataaaagcacttttatttggaaatttcaagttggaagaaaagctcttagccaagctctatgacctagctagctgattatttacaggatctttgggcaggaattgttaatgagcttttaatttggagtgcttaagttgccaaagtgctctgagctccagtgaagcaccacagaatctataaaggaaaccttatcaatcacttcccggcagctcccttcccccaacccccacctcctgaggaaaaggcagccaagtgggtttctaaccaggatcacagacacacattagtggagtcacactccaagtccctgtttataaattggcttttaaatggtaggagattcaggtataataaactaagctccaagcaagaacccactaaaacaaggcatgctgtatatgataaagtcagaataaagcagaatttgatgaagccaatttctggaagaaactctacaatcaaaactcatttagccactcacaacctactatagtttgaatagcgtacactcttttagccaataggattcatgttttgctgcccttccgctgggagactgattaaatgtctgacaagagtaaatgccattgaagtggccagagacctctcgcagacacaacgatgggcactatttgttgcaaaatccagctctaaggacaaaatccaaacccccattgaggggccccacatccagcatcttccaagtcaacaaggagcagttatattttgcaagaactcgcagtcaagcctcaatccaagttcatgctttttttaagaaaacacctgttgctggaccatttgcaagacaggcaaacagaaagctagccaggttaggcccttattcactccttccaccatcactactaccaccgcttcagatttacaaagaggtaaactgctaacctggtgtgtgggcatgtgttggcgagagggtcaagggaatgttctacccacaatctccatgctccatttctagcctctctagtcaaacctttttcttctctagtaatcccagtaagtcaacccccttaataaactcacccatcctgtcttgcaaagctctgccccgctccccctccgccagaacattactcagtagattaagtaagcatccagggtaagcacatgggccagcaccccaggttgcataaattctgcgcaccgcgaccctcaccccgcatgcattaaccagggcccaatcttggcggggccattcagcatcacccaccccggggtgttgcccccaactcgggcccatccaagtccaggggagagtaaggggaggggcggggggccaggagaccagccctccttcccagggccgcccccgccccccgtcagcagcgggagaggctgtcgccatggcaacgccccctcctcggggccagcgcggcaggctccctccaggtgcaggccccgacgtctccctcggcctcagcaagcgctcagggcagttggcggcggcgggcgcggcccgcgccgactgcggcgccggccaggcagaggcagggccagctccgcccgctccccaccgcccgttcccggccgcctgaacagcggcagccagcaccacgagtccacaacacaccgactcacctccgcgcactctgaccccgaccgacgcggcggacgggcgggcgctgtggccaaccgctgagcccgctgccgacccctttgaccaatgggctgcagtcaggcggggcttcttctccccaaacgctcgctctcccgccgacatgcgcgctaaggtatgtcaagatggtgactcccggccgccggccttatgggacttgtagttttgacgttgcacaaactcagaagagaagacggggacggggacatcacttctgatctgtgaaaggaatttttttaaaatgaaactttctatggcctacagcgatctaaccaggatcacagacacacattagtggagccccccatctccgttttcccgccctccaatatacccgtaaggtgaatgtgggctcacaacgtgacagaattctatttacatgactcctcatgattcgttcattcaacaagtaattattgtcatctactttcggatgtgggcctgggggagacctgagacaaggagggattaagctaagaggaaaatgcttagatttgtgaagggccgtcctaaggaagagggaactggcttgttcaggtccactcagaggaaacttctgtttaaaaggtttctggcctcagctgtgaggagcttccccagtcagtctctccagtaagctggagagacctgtgtttcttcatcctggttatgcctttctgggtagtcatgggtcccaggttatgagctgggaatgatggctttgacagcttcccaatcggtcaggaccccatcctctgggcccagcttcagttaccaagcccctctgtgtgctgtctgcatacttacacttaggatgatgtcatttctgggccctaccacctctgagagcggaccttaccataacggtttccacctgagctgagagtgcctggtaatccccatatcagggaatgccttccttaatcccacccacgtcataggttaggtgattctgctgtggacctatagcatttatcatattgtcttataattgtctgtttccttgttgtcgctcccacagggttttaagtcctttaggaaaagcattttttccatattgttcatgttgtatcagtaatacaccgcatagggcaggtataaagaaggcccgcaataaatgtctgcgaacaaatgagggaatatccagcagcagggacagacttatcccgaggtcagtaaagtggaggcactatcccccaactcttggagctggaacagattctcctattattacctacacattaaccccagttggtcagtcagtccatctgtatttatagtgcctctcttaagtgtcaggcactgtttctgttgctgaggattcattgatgaataacgacacacctctattctcaaggagcttttaaattggagagggaagctgggtgtcgtggctcacgtctgtaattctaacactttgggagtctgaggcaggaggatcctttgagaccaggagttcaagaccagcttgggcaacataatgagattctca

SEQ ID NO: 187 - DNA, 449578 bp, Homo sapiens
  source 1..449578: mol_type = genomic DNA
agaaatcctgaatcaaattgaaacagtaaaataaaatagtccaaagatgtgtaaatatatcactatcacaataactataaataggttaaatttgccagttgaaagaaaggaactattaaatgagattttaaaaatttggatatatgcttttcatgtgaacatacctaaagcatatacacaaaaccagaaaataaaaagatggaaatatccacagagtgacaaaggaaagctggtgcatttgtattagtatcagataaagctcacatttagataaaaaacattatagtaatagagaaagtcacaaggttaaagtttcaattcaccaagaaatatccattctaaacatgtatacatacccaattaagctgcctcaaaatatatatgacaaaaattgggagaactataaagtcagatataaggattgaaaagaaagaaatgaaactaattattttcagatgatatacacgtttacatgaaaaaactccaaagaatcttcaggcaaattattagaaattgtaggagagctccgcaagagggctggatataaaattaatatacaaaagtcaatgtcatttcactataccagaaaaaagacaataacattagaaaataaatctaacataagatgtagaaaaacttcttagaggaaaaattttcttgggaaatattaaagaagatctaaataagtagaattacataatattcatgcataagaaggcaacattttgaagacgtcttgttatacataggcctaggaataatatagttttaagctatattattttgaactgtagatgaagaaaagctctttttttccttgagtattttaagattttgaataaagtcatattgctctaggaatattttatacttctgccagcagtgtttgagaatgcctacttcctacattatcaccaccataaatgtttaaaacctgatagcacacagtttaaaaaatttgtaattctccaattaacagtgacctttaaaaattatgtttactgatctctattattttgtcctttgtaaatcttttattagtttttatgttcacatgttccgttttaaaatagacttttaagagctctttgtattaagaatattaaggctttgtccatataattagtatttttcagaataccctttctaggtacagtttttcagttccagtgcacagaatggaaacttgctacctgctacaccacattttcactagtatgtgatgtattcatcacaaacaacagtattggccaacattttccctcactgtgaagtgcacatttgacatcctttagaaaaattactgacggttttgagacgattgttctgtgctttctttcagtcagcataattttcccgaaagcagagatgactcttccagacttgctaccaatgcttgaacaaactgtgtaagcttagtccaaaaaaaatatttgattaatagattttattttggtagattctaaggttccaagcagtcagagaaataatcgcagagcctcaaatatctccaaaatctgataccaatccttttgattgtgaattatattctgtagctaccaaagaaggtaagtttttattttttctactctattaactttcccttggacaactgaatattaagatgactatgtaaggaggttatcagaccaaggcctcacacatcaggataaaagcacatgccatagaaagaacatttgtgtctcaaaaggtgataccaagacaaggctgtgggatatatatgggcacaatggttgataccttcaaagacttcatacatggtgtggaggtttttggagattttaatttataatgacaatctttccagttaggagaatttttggactgtaaagttagccaaacaacttttcaatgataataaatgtctatatcttacacagggggaatacagtttttgtttgttttagttttttctctgtctattcatataggggcatcatatgtctttatcattaaaaactgatttagataggcagttgtagagaaatttaatgtgtgggaatttaaagttttaaaaagatgtagcaaaatatagatacatttaagacccactgcaccaatgaaaaagggaaattaattaaactagataacttttatgggtactaaccattaaaattaaaattttagtcattgtaaattacattacattataatagttttcaatctattgttaagttaaatattttgggtaacaattgtatttcacagttgttcacactttgcataattttctaaggaaaatgagtcccttagggagaaaattgttcttaaattttattgttggataatgttgctgtactaacatggtttactgaagtggatctaccatgggtgtttaggtttttgttctttacaaaatgtattgggtgaaattttccatatcactggtgaacttttcatgctaattttccagtcccttagtttaaatattatgcattttttcctgcaaatctatcttgaatctgaaaaggccccagaaggaattagcgtgagtccagagtagatggactgcaaatgttacacatatttcaatatgtatccagctttcaaaaatagcttattgaaatcaaggttgaaccacatgaaattttgggtttttttggatgtaaaaaatggttatatattggcattttcatatcatccaatctaatatcttcctctagtgaggttctggcaaaaaaaaagtatgatgaccagagttgttcactcttttaagctttatgtttcaaaatatttttaaaatttaaaaccatctaagtgcatcccaaaaaacattggaaaattttgtaggctagttttgtttaacgatttttcttctatagatttatttttatgctatgccttactctccaattagattttagccatccaagaaaggtaccttgtacttctaagcaattctcccatcacctggacgttaactgcagcccacactgcagtgtcttgactgcagtaggcactcagtaaatatttattgatggtcctgattatgggatgatgaaatatgctaaaggtaacttaaacttttgtcaataaaaccgagtttcaggttagtttgaccttttccgtatctctaaatattttctttcatgtcatttttgtgaaatagctcacgaaagtacttattgattctgaaatccttttcccctctggtattcctgagctatcctcactcacacacagcacaccagtgctattgtttgctgttttgttaaaatcattctcattaatattcctcattcaataaaaatagttgattcccacttatgcaccaaactctattctaaagactgctgtttattttatggagtcaatatcatcattttgttttccattccacataatagttggatgccaatatgaagtgtatatttataaataatatgtgcttttatttatttgtttatttttattttactttaagttctgggattaatatgtgcttttaacattattgtttaaaaataacaggagatatcatatcttagcaccttctatattctgggcactgttctaaatgtatcaaagttatcatctcatttaatccctccacacacctgagggaagagagtattattccttatttacagataaggaagctgaggcttggaagattcatatatctaagatcacaaagctagtaaagcagccaagtttgagtctaaatccaggttttaaatatcatattgcatgtgggcatagatgagcaagaacaggttttcctgaagatggccagtctaaggcttagaagaaggaagctcggggagcctaaaccaagatatgctaaggcaagtttttttgctcgtttgtttttgagatggagtttcgatcttgttgcccaggctggagtgcagtagtgtgatctcggctcaccgcaacctccgcctcctgggttcaagtgattctcctgcctcagcctcctgagtagctgggattacagtcatgtgccaccatgcccagctaattttgtatttttagtagagatggtgtttcactatgttagccaggctggtgtcaaactcctgacctcaggtgatccgcccacctcagcctcccagagtgctgggattacaggcgtgagccactgtgcccggcctgctaaggcaagtattgaccattagaggagatgactagtcccagtggcaggcctttcctactgggagtcagccaagagctccccactcttctggttccattgttcctcctgcaaagttccattcataaagtggtttcccatttgattgtccaatgatgcaaatctccagtcctttttagcactgagtttctcatagccttttaccattgagtttctcatggctaatgaatgctaatgaattggcattccgatttatctataggattccatgagtcagcctcatgaaagaaggttccactccctcactgtgggtaccgtctgggaattagacccttaataggagtaattcagcaggcaatgtcttctctaataacactccagtctcactgagagcttctattcaaaacaacaatctaaaggtctacagtgtgactttcaactaaactgaaaaaagaatagaaaatgaatgtatgtgatgtacacattcattcaaatgtttatccctaaaattcatagcagattatgactgatcattaaagccaaattaagggggcaaaatgtataaaaacaaaaggaactcttaggcataatagtctttaaagtaaaacattactactgacagttgcttgtgtgaaagatatctttatttaatatggtaaaaagaacacaggaattgctagcacttaccgtatgtccattttatgtccaccttaaaatagatatgtctgtatagtcatcagattagcactttagaattcaataatttcaaagaaatcagaatggacattcattacatgtgcttatctggcaggagaattgaacaaatcctttctataggaaaatgtaaaattcctaataactccacaggattgtaagacttgggctggtaacttcagtgaatacagcagagtttgggcgatgggaaaaggtacagttgtgttcctaaactcttaactttgtgaggcagtgactttatttcttcttcatgattttgcagtaagttcagtacagtggttagtttcagtatagttcagtggctaagcttttgagagggacagttctatgttctaactcaacttctgccacttgttagaaagtgactcttgtcaaactattggccctttcaaacctcagtttcttcatctgcaaaactttattcatggggttgttgtgagggttaaatgaaaaatatgtaaaactcatcaaaattttaagcacaaaataccaagtctcagcagaacacatacagtaggagtccagccattaaaatttgaaacaggcagaggcaaaaatattttgtttagaagtacttgcattttctagctctttggctgagtggacaacattttggtgttctttttcttattgttattttttaaagcatacgtatatgttatgtagactcttttgtatgtatatttaactcacaataaatatttataaatagaaagaaagatatcacatatatgtgcacatacactggtaagccccaatacactgcctcatttctaaatgactctagcatttgtaggacagtgcttttaaacctttcgcactcacgagatactctggggagctttaaaatatatgctgatgcttgggctccacttccacatattctgatttaattgattaggggttcggctcaggcatcagtatttgtaaataaaagcttcccagctgattctaatgtgaagttaaaattgacggatactgataccgataaaagagtgagtgcaatagacacaaaacaaaataggagatgtgtctcaacaatggtaagattgttttaaaaattatagtacaattaaaaaaataatgtaatgcaattatttagaaaattcttacaattttgtattttgaaagcaccatgtggatatcatggggaaaaccagaactttgttggatttccttaacaaagattttgcagcttggtatcatttccattttgtagtattttgatatccaggagatgaaagtgggaagtggacaattgcctataaggccatgctttgcaccagggtgtccagatgagaggcaagtggagggtaaagtttagcctgcattctgttccctaaggtacatctcctggtgaggggtggcttctaatcaggggaagaagtcctatgtcttgtttcctaatgcacgcacaggttccacaagccctcactttgttctcaagagcatagcatttattttggtgcttaagactgctgaatgtcacaaaataatttttcccagcacaaacaaatattcaaaatagttatgtgcacagcctgtttgagcaccaataagttttggctctgtggcctgtttgggcactgacatggtttggctctgtgtccctacccaaatcttatcttgaattgtgatccccacatgtccagggagcgacctgatgggaagtgattggatcatgggtgcagtttctcccatgctgttctcatgacagagagtaagttctcaggagagctgatggtttaaaagtctttggcagtttccctttctctccctctctctcctgctgctatgtaagacgtgccttgtttcccctttgccttccgccatgattgttttaagtttcctgaggccttcccagccatgtggaaatatgagtcaattaaacctcttttctttataaattaccaagtctcaggcacctaaaccaattagaaggtgtgccattggcacacagcagggtcctggtgtctcccccaccatccagccaccactctgccaggtgtgaatgtattaactattgctggagtgaggtgaaaggaggcagtcctgcagaagggccactgccactgggatggcacaggagggcgctcgagagactcaccttagtgactctatcaactggtgaaaatatttagatattttcacaatcgatatggccttgcttgtatatacagggtgattataaactctcttgccacttatcacagaagtcgaagtttcatcatttcttttcctgtatttggtttatgtgcaacaatataggtttattttccagttctggaaaataatcatggttaatactgactgagaactgatcatttcctttcctctttataccaaccaatggggcaggtaccattattaaagggggaggaaatagaggttaaataacatgcccccaatcagtagtggggaaatgaaagaatcaggattcaaagccaggtttgtctgggtcttgggaccagctcagcgtctgtgctgtactgcccgggactcctgctgccaattctttctacctcattatccctcaaccctgcaccagcaaatccacagggcgtgagatgaagagaagagaggaccacaggcgagaaagtggcagcagcaagagaagatgtaccatgaggaagttctgggaggttctgcccgtctttctgagaacaggggagagacagagctgagttacaactgcactgcttcttagcttcttagtttctcttcagaattagtggcaaagaagagttttcgaagtctttagcatgtattaaacgaagaattttgtttataagaaaaaattgtggatcgttcccatgtttgtctggaaaactcttgttaaacttttgtgcagctagtaaattaagtcactgtttattctgtgtagtggaaagcatgcttaaactctaactcaggagacctgattccaggaatagttaagcctgagttcattataaaccacttaagttatctgtgtcattattctagtctgttaaatggagggcttgagctggtttcttgtaaggtgggatttggctaagtgctcttggatacagttgctcacctctttgagcctcagctttctttttggtgattatttaatcgcatgtgataacaaatacagggtgttttgtgtaatgcctggaatggcactgagattgtctccactacagtaaggaggtggtttagaaattagctaatttattaattaatggcctatagagcttcatgtaggttggtacttcaaagtcccattcatatggatcatgttcatatttatatattcatcacttttatttcaaaatctctttttctgctgagatcaactgagatttctagaaagcagtcctattgtcagcactttgcccagtacatttagtaagaacttgactagcattgactcaaacagttctcttagaagggctggcaccttttgtttcaatttttttaaacattaactgcccataataattgaagcatgaatgcactttctttggattatgaaacaaatcaatcacagacatgggaattaggtgtgttctcttgctttgttcaatatcatgcattttttttgtctgagctttcactgtgtccccagaactgtgcttggtgctaacagtggccccacagagtacggctttatattcaaggagatgacaatcttgttggaggaaaaaccttatacatagaacaattaaggaacaatgcaagggaaacacacattgcaagttttgattgtacctattttatggctatggtataaaacaaagcacctgttgttcctgagagtgaagggataagacaataactacaaaaaggtgaaatgagttaattcaaaagggaacattgagcatgtcattttcctattgaagtgctattatttggtatcggcttcctttggtggtgttggtttttgattccctctgccccggactctgttgtttaaagatgttctttctatgagggatcttggatgcattttagcagtgtttccactgccctttgttttatattctttgatgccatcccaggtacatcacattcttgctagatgagtaaaggtaagcatacttagaagtcaaaaagaaaaggctgaagtggtgacttagacttgagaaattatagattccatggagaaaactgtgtttaaatcacaggacaggctgaaaactcacattaccacctgatggaagtgaactctacttttataggttactaggagaaggtcagccttctgtaaaagcagataaacaaggataccattaccagagtttcaagtaatttaaattaagaactgaacattgatactgatatgatttctagtttattatctgtgacagaacccagtagcttattgaaaaactatcatggaagaaataactaagaaataaccatttaaaatatatcaggatataatgaggatgaagctttagataacacaaaaaggcaatttctctttaggctgaaaaataccagacacagatatatcgacagagtgacctgccagaatccctactttccagcccatctgataaaggtcaacgattgaacacccaaacacgttgatacacacagcacctgcctgatgaaaaccgttaacagtgtttttctcagcccagagtgcactgttttcttaaagttttgaaaacagtaatctaaatttccctattccatgagtaaagttctacttttttctttttcacactaaacagcattcgatgttttagctgaaagtcaattaagaaaaatgtattgtgtctgtgtttttcttgctttcttttaagcacctctaaaagaacttgttcttcttcctgaattgagaacgaggtaggaatgaaagactgaaacggtaactctcatcataattttattattatgacaagttgggtttatgaagtatttttccaattactgcctccaattgttaaataggtagataacatgccagctttaactgccaaaaacttgtagtccttaaaatattttttgtagtattactattagtatcatgaacagaaatagcagtgataaaaatcaaatcaagttttgtgaacaccaaaattccatttgcctgtgtgtggagggtggtttaggattggtagaattaatattctttgcaaacggctgcacctagcatggtcgccttgaagccctgggagttctctaattttcctggctcgagagacttccattaaacaagaaaatgaggtgggaaaggtcagaggattcacagggtaacaggaactggacctgaacctgagcttcatgcagtccgcagattttttaagtggtttgttttttagaagtgtttgtcacgacctctaaatcattgttaatttcatcgttaaactggcctcagagagattttgttttaaagagacaatgcagttagaggatcgtgatctctgaactcagaagcccagaactccaaagctggaagccaccagatcctagcaagtgaagctctgtcaatctggagccgcagattttgaccacgtgtgcacagccttccatctgggcaagcccttttctctccaccactccactccacagctgctgtttcttttcttttctttttttttcgctgaattcatcatccctccctttcccatgccgagacttaaaaggtttcaaatacttcaaaaatcaatgatttctaaatcacctcagatgacttacatacaatgttttattacattttcccagagcagaatggcatattaagaaatggttttattttcaactatattttctcttaggaatatagagacattatctcaaattattacctcgaagagacagagacaagaattttgcaccattctagttctcaaatcattttaggtattttatttcattttgcctaaatctcttagacggttatttcctcgtatcacttaaaaattacattttacttgggcagggcctaaagaattacattgaaaaactaagaaattattgggaaaaaattccattagcacaactatcatgatcagaagaaattggctaatttcagtgtcttttctttgggctcttcatagaaaattgttgaaatgtgtctttcataagtaactggcattctgaaattgatttaaagctgtagaggggaagaaaagctacattggaaaaattaaatcttaggtttggagatattttaaaaaactcaacaagttccatgcccagaggagtgcagacactgaccctctttttcagctattagaggtgaggaaaaaaagttgtgtggttggtgtggagagagagagacacacgcacttcctttagccatcatcctactaacaccttcacagtacattttcttgctaataatcccaaccatttctacagggaaaagtgcatgttcctgttctctggtagaagggccacccaaggaattcaggttcctggtgagtaagaatgacagaagtacccacagctcctgggccattggtctcctctatccagcctccactgaccttgctgggtccactgcagttttcttcttgatttaactctatgagctctctgttccttcaaagtactggagcttctggccttagcacatctgtttctgcagccagagcaccttcactgagaagcagacctctacttggctgggttcttactcaccctattggtgcctcttccccatccccctcctcctcctcctcctcctcctcctcctcctcctcctcctcctccagggaacatatagttggcagcaagggttgcagaacgaatgaaggcatgcatgaatgcacatgttggaggacgaaggttctgtttttactctcagtgcaccaaaacccagcagagttaaatagtggaaggttcttaagtgctcaagtgagtagatggaggtcataaggcaagcagagtgggaagggctagaaggagaagaaaggagaaagggaaggcaggagaggagagaggtggggaaaatggaagggtagttgaatgtcatagcaaattagagttagaagaggagaattagtagaaaacagagctagagtcaaaaacagagtgagacagacagaaattcatagatttgctgtctggcccagatctcattggataactagagcctcccttcttcctttgggttgaatggtctttactcattctttatgtagaccatcctttacttccacatggagtttgtatgttcccatagacaccaatactttacatatcagaacacttgtcattttattaaaaattgttttttattagtttcttttcccactagacagtcaatgtcatggatgcaggactatagggtcttatctttttcatcacagtagccctcgaacctagcacagtgaaagttgcccataatacattactaaatatttgttgaaagcctaaagcactgggcaaatcattttgactttccagacttcaggatccccatttgtgagggagctggtctatttgatacctaagactcccctccagcacaggtcttctataattttgtatctacatggcttcctgcctgatgccaggaacttaagatttaactcaagaagacagggatgttgcttgcaaagaccctgaagatcttgtcatccaaactgtgactgcctggagactgtttatacaggatcttgaactgggctaggagagtgcaatggatggtagtcccagtccttgtttgcagggagaggaagacagcgacaaagcatttctatggaaagaaggagttgctcataagtctactatggacatcaaaatatgctgatgagccacagcaagttcattacaaagggatttcagatagaagcctcctccttcagagtgaggaggaagaatcatccaggaaagagagaaattatgtgtatttcatatattgctgtatgtacatattaatcagccagcaaatattaagtgcattcatgggcaaaatgccaaagagatgaagagaaaaatcagactccaaggatcatataatctgattgtggaagaaaggcatattcatcatgaaaatgtagcaaagatgttaagtgagtgtcttagtctattctgtgctgctataaaaaatacctgagactgggtaatttacaaaacaatttatttctcgtggttctggtgactaggaagtccaagatcaaggcaccagcagattggttgtcggatgaaagttcagtttctgcttcatgcatggtgcctccagaggacaggaacactgtgtcctcatatggcagaaggtagaagggcaaaagaggaaaaaccctttttttttctttttttttgagatagagtctcgctctgtcacccaggctggagtgcagtggctcgatcttggctcactgcaagctccgcctcctgggttcatgccattctcctgcctcagcctcctgagtagctgggactacaggtgcccgcccgccaccatgcctggctaattttttgtattttttagtagagacggggtttcaccgtgttagccaggatggtcttgatctcctgacctcgtgatctgcctgccttggcctcctaaagtgttgggattacaggcgtgagccactgcacccggccagaaaaactctatcagttccctttataagggcacctaatttcattcatgagggaagggccctcatgcctaatcacctcttaaagccctgcctgttaatactatcgcactggcaactcctgagttttggagggtgcacattcaaaccatagaagtgggataagccagacacttgggtttcctatgggtcctctccatttggttttcctgttaaagatttaaaagagcagaaacactactttattagagaaagggcatttgaacttggcctttgaacatggcaggatttggccacttagagattgggggtgccattccaggtagagagaagagcaaggagaatggagagcacttggcatttatgagaatagtgagggttcatgtcaggttacatgaagctgactcatgacaaattaatttggaaaggcaggttgtgaccaggctaaaggcatctggactttgctctagaggaaatgtgaaaccattgcagatttctgagcaagctgttggccagagccgtgcttcggggcgactcacaacagtggtaggaagctctttgggagctgggagagagagagagagagagagagagagagagagagagagagatgggaatccaggggagaacagaacaagtgagaaagcagctgcattgcggcccaggctggggttgctggtttctggaaagggggtagtgttgggggagtggggagaggggttaaatgtgagcttctgaggaagtacaggaggggtgaattccaccatggagaaagtattcaataacaagcctacagagaatttgaggaaggtggaggagtaaaggacaatgatgtcctcgagaaacctgctcatgaaacctgctcaagaaacctgaggaggcaaaagcctgattctaaagtgtgagagagcaacagcacaacctggggaggtggggtatcaagtccgaaccaagggtgaagggcagggactcaggtgctggagtgtttcaatgtggatcttggggttggcacttgcttgctgagttaccttgggcaagttactatgtggtcttagtttctgtaaaatggagatcatgatgtaaccacttggtagggctgttggaaggatggaaggagttcagaaacagaaagctcccagcacagagcctggcccgtaataaacagtctatgtgtttgctatcacgagggtacttttaaagaaatttagtgcagatgagtataaatgagacgtggagtgagtagcagaatcaacacaaggtttttcttataatggatgagagattgtaaaacacatttgcattggggagaaggacacatgggagagggaagaaatggaagacacggaagatttgttggaggcaaatttagatccacgacaaaagtacgggagtaagtgcatggggaaaacttagtattggagggaggaaaaatggcctcactttgcacttcgaataacatctactttctttacctggtcctccaaaggccaccagggccagcctctggcctgtttctttagccgtaactcctccattctcccccgctgccatttgcacatcttgcattttctcagagctgccaagatggtcgtggccgggccttcctctagctagcctatcttcctgcagagcccttccctcagcttcttacttggctgaatctgttgtcttacccagctctcactttaaattccgaagtccttccctgaccgtcaggtccaaagtagccattcaacattccttacattacccgtttttccatctttacatggcattgatcttcacttggtgattccttgtttatttatttattggtgtactgcctgcctctcttcaccaacgtataagcttcattacagcagagacctcttgcctggtcatcacagtatccttggctcctggcacatggtaggagcccagttaaacgtttgttgaataaataaatgaatacatccttctgtaatatgtgagaaaagtgggaggcaagtctaggtgaagaaggcacttaaaaaaaaatttttttttgagacagtcttgctctgtcacccagactggagtgcagtggcacgatcttggctcactgcagcctccacctcccggaatcaagtgattctcatggctcagtctcctgagtaactgggattacaggcttgcgccgttacacccagctaatttttgttttcgtttttttttttttttttttttttgagacggagtttcactcttgtcgcccaggctggagtgcagtggcgcaatctcggctcactccaatatccgcctcccgggttcaagcaattctcctgcctcagcttcccgagtagctgggattacaggcctgcaacaccatacctggataattttgtattcttagtagagatggggtttcaccgtgttgaccaggctggtctcgaactcctggccccaagtgatctgcctgcctcggcctccaaaagtgctgtgattataggcatgagccactgcacctggccggaagacagattttgaagtggagaggagttagaggaaattgagtcatacttaattttatctgaaaatcatgaagtaaaataatacatagaaagtgaaggggtgaacttctgggtgtatatattcaatggaaataaaatcagtgtcaaaggtttctctgcacccccatgttcactgtagcattatgcacaatagtcaagatatggaatcgacctgagtgtccatcaacagatgaatggataaagcaaatgtggtatgtatacactgtggaatactattcagccttaaacaagaagaaaattctatcacttgtgacaacgtagatgaacctggaggacatcgtgctaagtgaaaggagccaggcacagaaagacaaattgtgcatgatctcacttacatgtggaatccaaaaaagttgaactcgtagacacagagaggagaatggtgggttgctggggaggaaatggaatgcggcagaaaggggagatattggtcaaagggcacaaagttttagttagataggaggagtaagttctggagacctattgtgcagcatggtgactgtagttaataatgatgcactgtatacctaaaaattgctgagacagtagaacttaaaagttctttttaaaatttttattttaggccaggtgtggtggcttatgcctgtaatcccagcactttgggaggccgagatgggcagatcacctgaggtcaggagttcaagatcagcctggccaacatagtgaaacctcgtctctactaaaaatacaaaaattggccaggcatggtggtgggtgcctgtaatcccagctacatgggaggctgagacaggggaattgctcgaacccaggagatggaggttgcagtgagcctagatcatggcactgcactccagcctgggtgacagagtgagactctcaaaaaatattattttaatttttataaataaagacaggttctccctatgttgcccaggctggtctcagactcctgggctcaagcggtcctcccacctcggcctcccaaagcgctgggattgcaggcgtgagccactgcacctggacaacttcgaagttcttaccacaaaaaaatgataagtatgtgaggtggtagatatgttaattagcttgatttaatcatttcacattgtatgtgtgtatcaaaatgccacattgtacccaaaaatatatgcggtttttatttgtcaattaaaaaaaagagaggggactataggcacacaccaccatgccaggctaatttttttgtatttgtatttttttttttttgagacggagtcttgctctgttgcccaggctggagtgcagtggcaccatcttggctcactgtagcctctgccttccaggttccagcgattctcctgcctcagcctcctaggtagctgggattacaggcacatgccaccgtgcccagctaatttttgtattgttagcagagtcggggtttcgccatgttggccaggctggtctcaaacttctgacctcaggtgatccacctgcctcggcctcccaaagtgctgggataacaggcgtgagccactgcgccaggtcatttttttgtatttttaatagagacgaggtttcaccatgttggccatcctggtcttgaactcctgacctcaggtgatccacccacctcggcctcccagagtgctgggattacaggcgtgagccaccatgcccgccctaaaccttttttaaaaatatgttttaacattctttgtgctcaaattcatgatcaatttttttttttttttttttgagatggagtctcactctgtcacccaggctggagtccagtagcacgatctcggctcactgcaagctctgcctcccgggttcacgccattctcctgcctcagcctcccgagtagctgggactacaggcccccgccaccacgcccagctatttttttttgtatttttagtacagagtttcaccgtattagccagaatggtctcaatcttctgacctcgtgatccgcccgcctcagcctccaaaagtgctgggattacaggcatgagccacggcgcccggcttcatgatcaaattttgtaaatggttgatggatagatgaaaaaaattctctaattgaaagacataaggatcactgtatgatcagcaaatgtagataaatgaatataatattgattcacttctaaaagaaatatattgatgtctcccactataattaaattttaatcaagttcttggacttctaaatagtttttgccttatatatttggctgttttcacgtttggacgcttcactttattaattattgtatctcctttgtaagagtgtaccattcatattacataatctctctatcttgtttggtcaggttttccacaactaatcaaaatgccttggtattaacgtgactctttttcaaagtagcgtggacaattttgctgtcatcatgtagtcctgggtctttgggttttatctttctaagactgtagatctcaatcttgagtttatcaatataatctataaaaaattccaaattaagccaggcatggtggctcatgcctgtaatcccagcactttgggaggccgaggtgggagaatcacttaaggccagaaatttgagatcagcttgggcaacatagtgagaccctatctcaacaacaaattaaaaaactgctggatgtggtagcgtgcaaatgtattgccagctactcaggaggatgaggtgggaggatcacttgagcccaggaaattgaggttgcagtgagccatgattatggcattgtactccaggttggagtacaaactttcagcttgtcactgaaaaaaaggacactccatatcactttttgccattttgtgtgtgtttacacatctatctatccacattgtgcttaatttggactttacaaccaagtgatttttctccattataaaagaaattgcatcattttcttttttttaaaattttactttaagttctgggatacatgtggggaatgtgcaggtttgttacataggtatacatgtgccatggttgtttgccgcacccaacaacctgtcatctaggttttaagccttgcatgcattaggtatttgtcctaatgctctccctccccttgtcccccaccacccaacaggccctggtgtgggatgttcccctccctgtgtccatgtgttctcattgttcaactcccatttatgagtgagaacatgcagtggttggttttctgttcctgtgttagtttgctgagaatgacggtttccagcttcattcatgtccctgcaaaggacaggaactcattcttttttatggttgcatagtattccatggtgtatatgtgccacatttcctttatccagtctatcattgatgggcatttgggttggttccaagtctttgctgttgtaaatagtgctgcaataaacatgcgtgtgcatgtatctttatagaataatttataatccttttagtatatacccagtaatgggattgctgggtcaaatggtgtttctggttctagatccttgaggaattgccacagagtcttccacaattgttgaactaatttacactcccaccaacagtataaaagtgttcctatttctccatatcatctccagcatctgttgtttcctgactttttaatgatcgccattctaactggcgtgagacggtatttcattgtggttttgatttgcaaggaaattgcatcattttccactgaacctaagttgcagttccattctgcctaagaccaccaaactcacctgccccactgttataccttctggatgtcagtgaaagttcatggacaagagaatatttgtaaaactgcattggatttctgttgagaaatgctatgttttcaaaaggtgaaaaaatgtagacatgtattttcagaccttttatttttcaatcatagcagtggaattccttgatggtttatgaaaataaatgtttttctcactcctaggccatttaaaaatatataatatggagttgaagttattaatagaaataactaagggtgagagagaatggcacttgtactattgagtacaatattagaagcaagtgctgttatattgccagactatataaaataacaagtgtttctagtgcactgagtgaatgtatggtttagaaaacattactaattacgtgcgtattcattgatttattcactaagtactcactgagggtctactgtgtacctgagtctagccagaggcttgtggtggagagctgagcaggtcaggtccaaacttatgttcttgctatttctttgggtgtgggtggttggatggttagctcagtggtctcggatgctggaatttgttctaataagtttctgagctgcttcataaaccaagagggttaggggaactatagctgagtcatctccttttcctcctcttcctccttcttcccctcctccccaccgtctgttactactattataggaaatttgaactggaatgaaaaaaaaatcagtgttacaaaaatggtcacattttggaataactctacacttacatagtgtgttctagtgattagaaacaaaaaagccatcattttaggctagatttttcagaatgatcacaatgctaccactgttttgcacttaccttaaaaaataaagtgcttcccctaagtttgatcatttgcttgttagcataatttggccattaaacattaagcattgtttgagacccgtaagtcaagccaggctatggtgaaacaaaattagcaaaattcgaattgatgccggaaactggtgaagccgccatagatttaaggaccaatttgccaggttaccgtctgcaggttctgctatggaccaggtgggggcagcagagagctggctgtggtctccagaagggaaggccagcacctgcctgcagattccaaggcacaggtggaggtggtaatgagttacgaggtagagtcaaggtttggactgcatctgagaagggaggaaagcaagagagttagaaacaccataaagatgagactgcagagcaagccagaatggaagtaggacaaagaactggtgtaagtcaaagagcaaaggtgcaggggtcacagggaggagaggttgggtgggcagacaggaggtgcccgaaggaggccagcctgcttcactagtgccccttccagtaccttcccaactcggtgagccaggtccatacttggttctgtttggtcttccaagggctatgaagggacagggatgtgagagacaccagccatctctctctcctgagctattaataatgaaagttcctgttttatgaacaaatactgaaatgaatggagaacactcaacaatttggtagcaatcagagtgtggtagtgaagcattgcctgggcttttccttctggttcctgcaaaggactaaggtcctcagcagcctctgtccatcttttcggagatttttcacaatcaccaaggaaatatagttcagtgctcctgtttacttaatggtcggctacgcttgaaatatcatgctctccctgtgtggtcttgtcataattattttcaaatggtgctaattagcagacccaacacatgggcagccttccttccccagacttggcaccctcactcgctgcatttagcacccctcatgggaaggcatcctggagatcccttatctgcaccctgtctccatctaccccttcccactcgcggaagctgcctcaccagagaaactgctatctgataaagaacatcaacaagtcctagcagatggctgcttatctcaagacacatatattcaccaaaatcctagcagaagaaaaagctgtgtttggatggtccctgagagctaactataacatgttcaaactgtgtaacgcagtttggagatggagacagagtatggagaaagaaagacaaagggagaatacccaaaagaggttttggaaaagaagaaaaatttgttctttatacatatatatccataaagatgagggtctcactctgtcatccaggctgatctcaaactcctgaactgaagggatcctcctgcctcagcctctccagtagctgcaactacaggtaccaagctgagcaagaagaaaaatttgagttaggctttagaacatcaaactaagactctgattttcttgagaaagtggatagaaaatttgtggttagagatgacaccagtaacgataggtttctactcttagctatgcctggggcagcttgaccgccactttgttgatcacattaatttacctcttcctgcctttatttccctttctgtaaaatgggaattaatgtgcttgatgacaatatctccaaatgatttttaaggcaagaagagagaatgttactgacaggcccatggttctctgggtgagagggtcactgtgaatgaatgtacacacagagccttttattagtgaggcttagggtgtccggtttttcttggcggagtaaacatccacccagtagtattcactcagtttgcattgttctgtcgcattgtttgtaaatcttttgagtgattacgcagcatttgttccctattgttcataatactctttaaaaagctgactataggactccagtccccactggtttgttctttgccacttggcaaaggttgattgattttatttttcctttggcctgtgcttcttagtggcttgaaatgaacacggctttttttcctgtttacccctttgcccacattgtcaataatagagtcgccctgggaagcagagtttgcaaagggaggagggtttggtataaatttggaagattgtattgtttcagatttattttctcaaatgctgaaactgcttctcaggggttatacttctttactcatgaaaactcacacattctcttaggtggtactgttaaacatgttacatttgtaaaaaaattaataaaacgtaatgaaagaagcaggaagcaagtgtatacacatggtggcctgagcaattggctgtcatggtttggtttgattataggtgtgtgaggcacatgtatggtgttgcgtggaacagatggatagaagtggtaaaaaagatgaatccaacctagtgcttttcaattctccttgcacatgagaatcacctggagaattaaaaaaaatacattgatgccgactgggcacagtggctcatgcctataatcccagcactttgggaagctgaggcaggtggatcacttgaggtcaggagtacgagaccagccgggccaacatggtgaaaccctgtctctactaaaaatacaaaaattagccaggtgtggtggtacacgcctataatcccagctacttgggaggctgaggcaggcaaatctcttgaacccgggaggcagaggttgcactcaaccgagattgtgccactgcactccagcctgggcaacaaagcgagactccatattaaaaaaaaaaaaaaaagttgatgcctgagtctctccccaaaaatcggaacatctgtgggtgtgggttcggcatggatatttgtaaagtctccgtagctgcaaagccaagttgggaaccactgataaccaacagaaaaatgcttctggaagtgtttccggggaaggagtcctagcctaggatcagacacctgtctgggctcaatacaaaccactggtttttttttttttttctgagatggagtcttactccgttgcctgggctggagtacagtggcgcaatctcagctcactgcaacctccacctcctgggttcaagcgattcccctgcctcagcctccagagcagctgggaccacaggtgcatgccaccactcctggctaatttttgcatttttagtagagacagggtttcacactgttgaccaggatggtcttgatctcctgaccttgtgatccacccgcctcggcctcccaaagtgctggaattacaggcatgagccaccacacccagccaccactgggttttataaactctcagtaggcctcctcttctggcctggtcccatgctatctgacccttcttgacattcaaaaaaagtatttttctttagttgaactccaggaacatgaagtggcattaaacagaagtatgaattgcctttattaaaattgcagtggtctttttcttaccaaaggtcctgacccagttgtggaaaaattgtttcttgaatgtgggtgacacatctgtttcatatctccaaggcaatgcctcagagccaactcctcccccgtgtgactcaaggatgccacgtgtcccacatgtggcctgttttcttctcttaacatggcctaaaaggcccttattgaactcccgttagctttatttatttatttttgagatgaattcttgctccgtcacccaggctggtgtgtggtggcgcaatctcggctcaccgcaacctccgtctcccaggttcgagcaaatctcctgcctcagcctcccaagtagctgggactacaggcgccttccaccacacccagctaatttttgtatttttagtagagacagggtttcaccatgtcggccaggccaggctactctcaaattcccgacctcaggcgatctgcctgcctcagcctcccaagagctctccttagctttgaaagtaaaagccaaccccttttggctggcccatgaggccccacacaccttagcattcctgttacctctaccacctcctctcctaactctgccctttgctggtgccaatttgactgcactagtgtcctttttgtgactgcagctgtgcctgggacactccggtctttgctcttgctactgttctgagctgtttatgtccagaatgctcttccagcagttagctacttgtttcctctgagtcttcaggtagctgctcaatatcagcttctcagtcaccctgtctgatcacctggcttataagtccagtccctacccttgtactccccatctctaatccctgcttaatcatcgccttagcactgtcaccatctgactttctttctatatatattttatttattggttagctcggctgcttcaacagataccataaactgggtggcttaaaatcagacatttatttcccacagttctggagggtggaaatctgagatcagggtgccagcatggtctggttctggtgagggcctcttccaggtgcagacagccaccttgctttttttcttttctctttttttttttttttttgagttggagtctcgctctgtcacccaggctggaatgcagtggtgccatctcgactcattgcaatctccaccttccaggttcaagtgagtctcctgcctcagcctcccgagtagctgggactacaggtgcacaccaccacgcccagctaatttttatatttttagtagagacggggttttgccatgttggccaggctggtcttgaactcctgacctcaagtgatccacctacctcgacctcccaaaatgctggggggtcgtgagccaccatgcccggccagatggccaccttctccctgtgtcctcatgtagcagaaagagatcaaagagctcttttgtttcttttatgagagcactaatcccatcacaaggccctgacctcacaacctaatcaccttccaaaggccccacttcctgtcgccatcatattgggggtttggatttcagcatatggattttggggggacacaaatctttcagtccgtaatagttggcctcctcccttgttccactagaatataagcttcaggaggtcagggatctttgtctcttttgtttacagctatgttcctaacacctacaacaatgcctggcacatggtaggtgctcaggagataattattggatgaaaaaaaatgaaccggtctcctccttaacccctgaaatcctgttcgagtcgctgggtttgccttgctccactgggatgaagtcctggcttggtgtccttgtctcccaggggtagacgccccgtctctgggaggacttgaggctctcctggcctgctgcttggcctccttacctgttctgcccactcagagccctgccagctgcctgggatggctgccgggcacgtccttgttcctgctcagtcaaccagttggggccttggtttggaccttcacttattcttctgtgaacctacctctctggtccccagctcgtcttctgaaattttgatgtgttggtcaagcccagtcttgtttgcacatccctgtgaatgattcttaattatatttctggctggctctgtgcagtagaccatagaaataacgattgtttctggggttgcgctggagtgtgaacaggtggggaaaatgcctcaggacgattggaccgaggagactctgagatgactgatgaaagcgacagcaagagctttccacgctcctgatggcaggaggggacggcggtgctgaggggtgggggaggctcagggggagctgttgagggtcccgtgctcgtcaattctctagcttctcaggcgccttgatcttgtcatttagaagcctctggaagcacagggactgtggaaactggaagctgttcttggactatttcgcaacacttttctccaggaaaaagaaaaaataaaaaaaagcctcattctcttcgtccccaatgttacataatcgaacatttcccgtcctggttgaaatgaatatcctctttgcctgaataaataatgcacagattcttcgggacaggctgcttcctccaggccgccgcttccaagggatccggtcgctttgtgggtttagtggtggcccacagctggacgcggggtccagcttggggtgggggaggcggtgctttctgccaaaatgtcttttaaacgtctcaacaagtagcaaacaaggccccacctgcgacagttgtagtgattccggaagacctgctcaccacgaggtgctggggtcgcttgcagctggcagtctccggtggctgcagtttaaataaatctcctaagtgcagaatcaccacacagggcgcggagaaactgaaaagttaaaacatctggagttacaaacactcacaggcctatcagctgtctgagtccccgtaggaaaactgtttatcggatgctttagtattcaaccttttatttcctagcacaggttttttgattttcacatggagtgtttgattattttcccatgcccaagtcactgttttcatagcctgttgtttaatctgtgtgcacctttgttttcactctatttcctttgctttcctatatgagaaaaataaatggcaccattgaattgcacggtagaggctgatgctattccaggtgctcaggttggctttcccatctttcgtttcctcctgtaggaagttttttttggtataaagggaaggacagaattggatctccctggagggagtttcatgtgtttcttattctgagctgccgggagctggttcacagcacaacttgataattgctgagtagacctaaagttttgaaaatcaagatctctttggagttttacaagtaaaatttcaaaaatgagaaatgactatcccaatttattttagaagaaaggtgcagcttgtaaactttcatgaatttggtaaaagggggctaatttgaaaaggaaaactaataggcaatatttacaaattgtgaaaaatatcagaatagtatacgtggaagagttattagacattccatttgcagtggtaaacccattcctttgattctgaatcttgtttaggtttccttaagaatttgatgaagttttcagactcttccttcagaaaaatgcacatattcttatgtacctaaatgtttggatatgatttcaggggattccaaatcccctggggaccccccatgtggatgtttgtgatgcagaatggggtaagaaaaccaggagagcctacaaaaattttatgaaatagaaatatgaacatacagtactgagccaaaatttagttgtgaggaaaatgatgttaaatgcattcattttctaaatgatgacagaaaattagactcatattactatccgggtgaagcatattttgtacttatggtgacctagtgatccaaatgcctgctctttggtcttatcctcttatcttccttatgtcaatactgggctgcttaaatatgtactgtctccgatgtcattatctagttttgttctttgttttctatgttttatcttttacttcttgttcctatttcaaatactttgacggtattgggacttggggacatgtcctttccagtacagattttggtattgtagagggaggtttacaagcccaggtgggtgtacttggggactgaggctgctcagtagccctgtaaatggtcagagtctgctgtttctgttgcttggagagcaaggtgaatgcaggtctctttggatattggggatgatagagggatgtggattggagaggaacaggacttcctgccccctcaatttaaatggagattcatttgatcaaaaaaaaaaaaaaaagcacatatattcaccaggccctgtgtgaactaccaccttggatgtaggtggagtaagccatattcccaggtagcctgcaatcaactgcaatccattggtggtaggaggcatgggagatacagaagtaactcaggactagattgaattggccacttatctaagagtgttatcaagtgttctgtaaatgtgtgaattctgattagttatcaggttgtcatacatttttttttctttttttttttgagatagagtctcactctgtcgcccaggctagagtgcagaggtgctatctcaggtcactgaaacctccacctcccaggttcaagcaattctctcacctcagcctcctaagtagctgggattacaagcatgtgccaccacgtctggctattttttttttttttttttttgtagttttagtagagatgggatttcaccatgtggccaggctggtttcgaactcctgagctcaactcatcagcccacccctgcctcaaaaagtgctgggattacaggcgtgagccaccacacctggctacgtgtcatacaattcatttgtctcccttcctagacacaagctcctcaggatcatatctgttcttccttgctggcacagaggagatgcttcagtagtgcttgttgctagaggagaagggtacaagtggcatgtggagagattcagagaagggtagaataggatgatgttgggccatcaggaaggtctccatggagaaggtgtgctttgagatgaacactgaggaagtggtgggatcacacctgacctagatagagaaggggctgaaatccaagcataggatggtgggagcagggaaagagaggttgactgaagttgaaggctggagaggttggctggagacgggtgatcagggatatggtaagtggtttgtgcttaatttaatcttgcagtaacacggtgaggatgattaatcgggaacataatctggtgaaggtatgttggacggattcgaaatggtagaggctgtcggcaaccagaccaattaggacaccattgcaaaagtccagctgagagctgaagaggatctgacttgtgacagggagtaggacaaacaagggatggaggctggaggtattttggagatacagcctgcagttcttataatccaaacttccccagaatatctcagcccaggaataaaaataggatgaaaacaacaataacacaataatattttatctctgctttctatcaactgtttgcaacctgcaattctttctggttcttccttcctgcggggccaggtgaacaggcaggtgctgaatatcactgctgggctcacagaagcccccagtgctggggggccaaggctgcggctgctggtgccaatcaaaggcacccataggcaggaccctcttccactaggtttcattgcaaacgggaagcctcaaggcaggcgctttccactgctaatcggtacctggtacaggaattaaggcttcactttgtttgttctgaggggtttacagagatttttcttctgtaaagccactgctcctttcactaaaattccggagtttgtgcaagctgggaagttaaacttagcaacagagtctctgctgtatttaaatatcatttttgtctgacactggcctctttttttttttttttttttttttttttttttttttttgagacggagtctcgctctgtcgcccaggccggactgcggactgcagtggcgcaatctcggctcactgcaagctccgcttcccgggttcacgccattctcctgcctcagcctcccgagtagctgggactacaggcgcccgccaccgcgcccggctaattttttgtatttttagtagagacggggtttcaccttgttagccaggatggtctcgatctcctgacctcatgatccacccgcctcggcctcccaaagtgctgggattacaggcgtgagccaccgcgcccggccactggcctcttgtccttagaggaaatatgtgaatttctcctttctgctcagaagtacaccttagtagttgacaaacgtaaactacccgaagggccagccttctctggatcctacttgagaccttgcttcctgctgagaagtgtgtgcatttgtgtatctggtgatcgagatgtctggaagagtggggagaagactgaggggcagatggggagtaagaagggtcagaaagctattttggttcagcagtatcaataatgtttttgctttaaatcattgtcttcttcaatgttgcttcctttgtcactcctgtaaatatgatagcccatttattcttctaatagaaaatttttcataattatttcctcacataagatgtttatggctttatatatatgtgtgtatataaagaggaggcacataatttatgaaagcagattttaaaagcctttctacagatgaaatgtaaagttcaattgcattttttcttttggagatgggtcttactctgtcactcaggcaaaagtgcagcggcacgaacgtggctcactgcaacctcaaacagttctcccaccacagcctccaggtagctgggaccacagacatatgccatcacatccagctaattaaaacaattttttttttttttttttttttttatttagagacggggtctttctacattgctcaggctagtcttgaacttctaggctcaaatttcttgatttcttccaaaagtattttctgcttgacattgtcatttgaagaaagatagttttaaaaaaatttgaagaaagagactatttttatccctataagcttgaactagggctttcatactgagtaaaagacagtatacagtgtcattgaggatgggtcatattatggctccgttgtcgaacactctagatctggacactgaaaagtggactactgatggattttatgcctctgctataaaaaccagcacctggggctggacgcagtggctcacgcctgtaatcccagcattttgggaggccgaggcggccggatcacgaggtcagcagatcgagaccatcccggctaacatggtgaaaccccgtctctactaaaaatacaaaaagaaattagccgggcgtggcggcgggcacctgtagtcccagctactcagaaggctgaggcaggagaatggcgtgaacccgagaggcggagcttgcagtgagccgagatggcgccactgcactccagcctgggtgacagagcaagactccatctcaaaaccaaccaaccaaccaaccaaccaaccaaccaaccaaccaaccagcacctaggccctggatgcatgtttaaggtagctaaacactcttaggttacactattctgatgggaaagaccaccagaggtgcccttggatacctggtaataagggctatagaagaaattatggaaattctacaaccctgtcagtgactatagccaaccatgcggctatagccagaccctgcaatgtgctcatgggtccagagccccctatgtgttatctcagctcatgggctttctctgttcctgcataacttcacttgctaggaggctttccttactttggcctccatgccaccctgagacatgcccttgtcctttgcggctcatgacctcagtgcaggtttccaaattcataccctcagagcttgaatgattggtccagttcatctttttcacatttggtcatgtcctaggtcactggccagtctatagtttggctgatctttggttgggtgtctcaccatggtccagttagctgtgatctgaagtgggcgtagggtggggaggttgtatgaacttgagttggttgttcaagtaacaggagctgagagcatggcaattttccttagaacgatagtgagtgagtggtcaggtactgattgatatctccaggtaagcagagtttcaattttggttgctcttcacgaggaaagccagaagcccagagctgttttgctagagtgatagaactgagatagtgttttgagcagtgcccagtgggaacatctttgctgagaagaacgaataaagaattttggcaattaactatgtaactgagtcccagactctgctatcatctggggtggcagataaaaacacacagtccaaataaaaaacctgattttttattttagcctgaatcacccagatcacagcaggattttgcttgaacaacccagacagattgcatccattttctgctttactgtgcttgtggaagccaggctgttagtggtttcttctggaatgggagaatgtatcacaaaaaggttggaacctgaaaaatttctagaatttcattgttctgtgcttcttaataaacaatgtgacactaccaaggaatgtgtgttgaccctctttttttaaaaaaataaagatgtagtggatagcacgattttgatgaaatgtcaggctttatttttcatttgaaaaatgtgtgtgagggaatcaggtgtaatggcatgatacatctctttaaattatacttacgagattaaatttgtcctgtgtttcaattacactgtattatactgcttcatttaaattgttgttttcttcttttttaattgttcaacctaattgtctaatagtgatgaatgcaatttaattagacacttttccttgaaggatatatatatattttccctataataaagcacagaatagtttaaaaaatgtattggtccaagcacacatttttatttttagtgatttcattagaacaataaacttcaaaatgattcataacaacctttctggattgatttgatggaactgtttttacccattcactgataaacctgtcaacagtttcctctcatgacacatacaaagcacgtgtgttcccatagtgtgtccttgtgtgtaattccttgtgctggttcagattctgaaatggagctttaaaagcatggaggcttgagttggtccatgtgagtttgaaccctggccgcagctggtatgggtacttaatctcagtatcccacggtttcctcaactgcaaaatgggtttttagtagtacttacctcactgggttgctacaaagatacttaaactagtatctgacatctagtacagccagccctccatatctgtgggttccacatctgaggattcaatcaacctctggttggataaaaaatatctaggaaaatagctgcatactaggggaaaaaaaaaagaaaaaaatatccaggaaaaaaattgtgccagtactgaacatgactttgctcttttcattctctaaacaatatagtataacacatatttacttcacatttacattgttttaggtattataagtaatctatggattatttaaagtatacaggaggatgtgcataggatatatgtaaatactatgtgattttatatcagggacttgtcctggaaccaatatcccaaccctaatactaagggatgactatatatgctcagaagacatttgttgtcatttttattctcttgcactcaagaaagcacatattggaatgcaaacgaatatcaataatagttttttaaaggataattaagttaatttataatttacatacaatatacattgtacatttatattttctaatgaaaaggaaataatctataaccttcagttcagaattcattagctgtcctattttgagaactgttgctctatgtaattttcatctctgtattgatgtgtaaaactggttttaacaggtagctaaatgctgtttgaaaagcatacttcacccattctggcaactaaaataattgaaagatttaattaatttagaaaaaatatttcgctttcaaaacacttgaactgttcagagcatgttattcaataatctacctttcaccagaaatcataataaacacaataaaaatgcttacagaacccccacaatgcgttagtatacatgattattccttgtgtaagtgaatcttgttgagattttatgttcagtcaattgcaattaaatactttacatattaactaaaatgtgtcctgctctatgtattctggagaagttactctcagacaaatttacatatttaaattattttatgggctaactgataagtatagagaagactgaagacagttaagatcattgatttcaaaatgttttaaagtgttgattatttattttggttttctttctttcccatgccagttttgagatgcacctcttacttggcaggtgttcctctgtactgggtactgggacagagagaaatacagtagcaagagggagatcctgcctccgccccattctaccattctcactgccagaaagccagccttttttcaaggcttgtagagaagaaaaagagaaaatatttttaaaaattcatttaaagtacctactgcataaaccacaccagacatgatgagatattaaaatgtcaatattattaaaaatttttaatatgattttacagcccctttgctactttaaaatgtttatcttagtgttaaacaaacaatcaataacctcataaacttaaaaattgctgcaggaaataccggacagtttatggaaggatcatatgacagaaggaagggctgaagagtgtgagaagctagacctctgcaggttaccgaagtcaagaacctcattaatcggtaacaagaagtgcagagcgggcttttgagtccatgcctgagtaagaaagtcccaaaaaacactcacagaagatatttccttgcccctgcttttagtttagctgtagctaactttggattaacaaaatttatgtgctgaatgatgttttatttttttttccaactccacatgcctgtctagacttcaagctttattacgaataaagagaaaatcggctggatggcataaaaaatatttcaggcagattaacacatgatttacctcttcttgaacatccatcttaatggaagtgctaagaaagttagattcgggcctggcttggcaaaagcaaggccaccccctcctctattttttcaatgagattttccaatcctagtcaaatggtggtgctagttctttatttttgagttactgcatttcctaatttcatggtcataacagcctcctgtctaccgactcagaacggattttaccaaaactgaaaatgcaggctccatgctcagaagctctttaacaggctcgaaaggtccatgctcctttctcctgcccattctatagcataagaagacagtctctgagtgataatcttctcttcaagtaggtactcctatttcttctcaatttattttttcctttttgatataatgtgctactgtttacaagcatattgtaacttcagagcttacctctcatctttaaaaaatgttcatttttttgtctttctgctccaaggatattttgcaaagttactggcaagtattcctgggatgataaaatgtgaaatctaaacttggtacagtggaaattcacttctagaataatatttagctgaggcagagggcaatccgactacccttttcttagtacagcacacacaggctgcctgtctgttccagataacataaatgtattggatctagcactagctaggagacactgtattgttgaactgtgttagaattttataagctcttaattggacaaatctcagagtagcatgaacacactacctgttttctgaatctttggagccataacttacgtgagtttgaactaagcgatgtgaataagccattatttgtttcctaaaggcagtcaagttttctgaaaagctacacatttagcagcaaaagaacgagcccctctgtcttgaaatgggcctctgattttaagcaagctcttttgagtcctggtgtcccattttctcagttcctttttgcctcacaatggcacatacataatgactccaccacatatagcagtgggctactcgggtaatgatgtggcagtcacaagacagggcagaatactttcattttggttagaggaatgccacatgtcttaggaaatgctcgctgaactgtaagtttcatactttgtcaagaagataaccagtattctctcaaacaagtccgtaggagccaacatgattaaaagattttaaagcaatttactcgatagaagggttgggcttaatcaggacttgtgatcatggcaatggttcctgcttaaaggtgccagatttttaatgcctttatgtgccagatctaataggcttacagagcaactccatgtatatgaggttgctgggaaactcatctggttttgaatgtggtatatacatattttaatattgagagtaaacaggaagaccaggtagaagtatttgaactgaattctgaaacgtacagagaacttaaattggatgagaatgtttgagaaccatggatggttcagggtccatttgtataccataaaatcccttcctatttctcaaaagcaaatattttctttgattttgttaatatcctgtgatgactgcccactaggccttggaatgcatgcagataatgctgtagcagttggataaaatactctagaatgtcagattttcaaggaaattacaaataaaaacaatgtaggtaaaagatacgacatgtaggaaaaaagcaaaattttccttaagaatacaagcgtcgtatttacgagtagaagatttttcttggacatttggagatacgtgtttcattttattgcttgtgacagtcaaggaaaggaataaagctcttgtgtcttaaacttgcagcaagaacaaagtccaactatctttcgtttctgataactctgtgtctttttgttcaatattgggtttagagctagctaccatctaccttcccttcaaacactcactctaaacctccacacagtgtaagtatttacatcaggcatctgctaaacattttcacatggttatctgcaggtcttctctgagtctgtctgcattcatttatcctagttgctcagaacaatcgcttgggctgacggcctggtggttgagtttactttgctttgaatagggaacagctgtgctccaggactgcagattggctattcggaaaaaagggcaaggaagagagtgacccagctctgggtagaccatccacactgtaaaaaaaaaagtcatagcatagtcttcatctatggcagtggagatatggtcctgtccatccacctctatcaggagagggtctccattgttaatctccgagaaagaggcgccatctgtgaaacctcctgcatattgtctaatgaagtgctattttgaaaggcgtgcactgtacaggtaagagtgatgatggtgtgcctgccttctgggcaacatctcagtagacttcctctgaatcattcccactggacccaacagcaaaagcgtacacatcattgagttttatcgttctatctaaggcgtataacatttttctctctgaaagtctgtgattctttcggagaatgaaggggcttaccctatccatctgcccctaaaaatattcgctggaaagctgatacctctgctcaggttttccacagcagatcactcttcagtaagaattctgatattaagtagtttaattcagatccatggaaaatgactgagtaccagccatagctcccaccactctctagctgtgcaatttagaggcagattatttaacctcatgccttgaatttctcatctgcaaagtgggagtactaacagtagctaccagatatattatatggaataaatgacattaagccactcattaaactccttgcagtttccaagcattagaaactcagtatgaggaagttatttctattctaagcctagcacagtgcctggtactcaatacatgttggttgaatcagtgaaataattcaaggtcagcaccaaagctgctaggaatttatgaacatctgatcataactggaaacttgatctaaaaagcaaagggcagtcaatccaatcaactgagcgtaccatctgttgaaatgctgctgcttctgtaatgagtataaagtgttggaagagaaagtccaggaacctccatcattcttccatcattcctctcctttgtgactatctttgtgatgagaagggtaacaaaaaaatcttgctgagatgagcgtgtcaaaaacgtgttacaaatgcttcacattccctttcacatcaacagaagcatgttgcttcattgttgggcaatgtcttagtccatacacacatagagctctatgctgatttttttttgagatggagtctcgctctttcaccgaggctggagtgcagtggtgctttctcagctcactgcaacctccgcctcccaggttcaagcaattctcctgcctcagcctccagagtagctgggattacaggcatgtgccaccatggccagctaattttcatatttttagtagagacggggttttaccatgttggccaggctggtctcaaactcctgaccttaagtgatccactcgccttggcctcccaaactgctgggattacagacgtcagccagcatacccggttgtatgctgatgttctaattcaatgtgataccaaagacctgagatagtctctcccactctggccccataacatatgtccacgaggtggtaataataacaactatagtagcacctaaggttggggcagctcttactttgtgcgatgctttttatagtgttattacgtgtgattctcacagcaaccccaggtggtgaacaacgttatgattcctgttgtacaaatgaggaaactaaggctttgcaaagctaggtaacatgcccaatattacacagcttcaaaagtgacagccctaggacttgaagataaactcatctaattccaaagctcatgcttttagccattacttgagacagtattaacttttaaagtttgtaatcaatatgaatttggccttgggaaagcaggttaagcatctggggttgatgggagataacattacaccctctcttagcctcagcaacttcatctgtaaaatgggaataattacatccgagtcacagaagttttgtggctcttcatgaggattaaataaagtaatgcatgtaaaagagttttgtacaaagttcacttttataaaatgcaagttgtggccgggattggtggttcacgcctataatcccagcactttggggggctgaggtgggtggatcacctgaggtcaagagttcgtgaccagcctggccaacacggtgaaacccgtctccactaaaaatacaaaaattagccaggagtggtggcatgggcctgtaatctcagctacttgggaggctgagactggagaatcgcttgaacccgcgaagtggaggttgcagtgagccgagattgtgccattgaactcccacctgggcaacagagtgaaactgcatctaaaaaaagacaaaaaaaaaaaaagtaagttgttatatgcaatgcataaattattacttagttccatgtaaaatcttcccactaagtgaatgagggttcacctggctgtagtgctatgagatagatatgaggggcagattggtttatgcttctcaaaaacagaaagtgtgccagggtggaagtgtgggtggggagtctccgcctcccagccatgtggcaaagctggaatgtgagtacagcagcagtatggatgcggttttgaggggatggtggtaatcctcttctggcggcacccctccagtattgtgggatgctctctgatttcttttgagaagacaagtagctaggagcttccctagcctttctgttgtaaaaaccatcaagatccctgttgaatgcatacctggagcttggtttccctaagcacagactttaataacttcatttggatttagtctcctatttaaagctgccacccactctcaattttttgggttttcctactaagaatggatataacatgggcagtcttccagttctcctttcttgctgccttgaagacaacacacaggccaatcacaaggaggcagagacaggccccaacaagttgacaatcctagagagcttagtgtgagtagacttgctgaggttcctgacttttgctggaataggagagtgccactggctttttgacatttctttttccaactgtttccttgtcaaaatgaccagcagctcagctcccctaaacatacctcctcccctagattggttcagaggaagccatcaaggtccttttgcaaacggatgatctgcatttttgagatccttctttcctctgctgttcatagaaatggtctcattggaataattccttttggaacgttactaaggacaccaagaaatcaacaagaaaatttgagtgtatctgacagaagaaatttggcttttgtactctaataattatttattagaagcaataactggtcagaatttatttgcttaaaaccatgtaaagaaaggtgcttaataaagataattgcatcacatatagtaatccgttttagtatctttcaccttaaaactatgtgacaaataaagacacaaattgctctttctttctaataagcaattttggaaattccttattgggaaattccaaattttacaaaatttacaaaatttaaaattttggaaatcgtacctgcatcaagttttctgaaagaatatttaaggattaaggttacttagaatccaatatatgcatagtttaatttaactcatattgttaaattctttttctaattttatttaagaaatgagtaatattgacaagggccttgctgtggtttattatggcttgtcctagagtctctattcccagctagattaaaagtgcctcagggctgggcatggtggctcatgtctgtaatcccaatattttgggaggctgaggccagtgaatcagttgaggccaggagtttgagaccagcctggccaacatagtgaaatgctatctctactaaaaatacaaaaaattagccggacatggtggtgcatgcctgtaataccagctacttgggaggctgaggcaggagattcgcttgaacctgggaggcggaggttgcagtgagctgagataacaccactgcactccagcctgggagacatagagagactccatctcaaataaataaataaataaataaataaataaataaataaataaataaataagtagtgcctcgggtgcatagatggggttgttcagttttctaccctgtgccttgggaagtgcctggtacacactggtgtttggcacataattgtagagtgagattgagcctggcatgttccttgatccctagacaatctctatcaggtgtgatcagtaaggcacataatatgatatgtgactattacagagtagcacactacaatatgtgcctaaagccataacatcaactaatacaattcagcagagtagaatgtgaagagtgcttgcagagtgctgagcaccacggtgaggaagtgtaaacagaagaaggtatttctgggttggtgcaggatggttagggatagctttgggtaggaagcgactcttgaccatgaccttaaaggacaggtaatgtttacatgggaaaatacaaggaaaaggaggtgcataatgaaaggcatgggggaggtggttttgggaaaccatcagtctgacagaaacatagttaagaaaagtgcaaggtggtggtaggaggtaatttagaagtggagagtcagatgtcctattaaggagcttgaactttatcttgtaggcattaaagatgttggtgtaggattggaatgaaataaagacttaaccttagaaaaatactgtgtggattgaagttttcagatgaagagtgggtacatcaattcggaggtgagggaaatagttcaagggaggtgtcacaccattaaaaaaaatcttttaggacttgttttttgcaatcatgattgtttatggttgtaaagattttgtttcagaaatgattggtggagaaagaagtgtattgagaatcaaaagatgggactgtgccactgatgtgcgcagtgagaagctgcaagcttggtgccccatcttcctaactgtaaaatgggcataacaactaccagacagccgtcaaaacattatactagtgatacaatgaagactaagtgatataattttgaaaggcagtatgccttatatgtgtaaaatgctgtttacttggaatatttttatagtaaaattattttctttggacaagatatagatgcagaagaaaatgatcatatttctgtgagattaggattcagaccatttgaattttttatatttattaaataggtactttatgttgggtactgaataagtcttttatttttaacacctcatttccctcacaaaatggatggcatctttggactaggggaaatgtgtggtccctgcagctgtagtattttatgattctatagcttttgcctttagcaaacttctcttagaatagtgatttaagggctgggtgtggtggcttacacctgtaatcccagcactttgggaggctgaggcaggcagatcacctgaggtcaggcattcgagaccagcctggccaacatggtgaaaccccttctttactaaaaataaaaaattagccccgtgtggcagcatgcgcctgtagtcccagctactagggaggctgaggcaagagaatcgcttgaaccgggaggtggaggttgcagtgagccaatattgtaccactgcactccagcctgggcgacagaacatttaatgctggtggctcacacctgtaatcctagcactttgggaggccgaggtgggtgaattgcttttgctcaggagtttgagagcagtctgggcaacatggcgaaaccccatctctataaaaaatacaaaaattagccaggtgtggtggtgcacgcctgtagtcccagctacttgagaggctgaggtgagaggatgacttaagcccaggagatccaggctgcagtgagctgacatagcgccactgcacactgcattccagcctgggcaacagagcaagatcttgtcttaaaaaaaaaaaaaagtgacttaagatactgacagtataaacacaaccaaacccatgggcatctgtgctgggaataaaagacagacatgttttcattgcactgatttaggattctgcttggaaaggaaaactgtgatctctcctgcagttgcctaaaatgctttacagttatgggaatggaaaagctaaattctgtgatttgtgggtagagggaaggaggacgagtgtcctttctgatttcctctttttccttctcttccaaggggaaataaaaggctagagcaacaatttaaaaagaaaaggcaaggagctactgggggtagagtcgggagggaaaaaggccaaacccactaaataatttcacttcagttacagtaaatctcaaatgatgatgctacactcctgagaatgttccatggtggaaatgcctgggctttgaattttgagcagcgaagtaccaggagagggtgacatgataacattcaacaggaagaacactgctcttgtccgtttgacggtcctattcctccggatcactcaatcttcacaaatcaagcatatagctccttcacatgtcatttgtgaagggaaagactcctaggaaaatgttttctaggaaagggaaaaaagcagaaagcaaaggtctcctgcttactacagcattcgtgttgcataagcagtattaatgtagtggagtattaatcacttagaacagttcacgtattattcctatctgggctctgcagggtcctttcttcacttctttctcgacatttggattctgtccattttactcctccctctgcacttggaatagaagtgaaatttgttgtgccaattctctgcttgttagaagccatggtaatgtttagtaggggaaaagatttgtactgctacatagaaggaggttttgggattatttaagactttactttgttgatgggattcctagaatctactattactgggtatactagacaagtttgtagatttacaaaagtgtggataacatgggttgcacttgatttctttatccagctctttggttctaaatttattgccaattttatttatcaaaactattctcagcggagtagtattttctgtggacacaaggaaacatctgtgagcttaaaccttagaggcagatagccagttagaacatttggcatatgaagcttagatagcagaagagaaaaattaaccaaggcaaccctcaaaaatattgagaaggcaactaagaaaaatttcttatcactgacagactgcagtattgagttcgtgttaatgaagaaatgtcagaatacataatgaatcaataaggagtgtcatattatggcaagtttcaatgttggtgtcaatctcgactgccaggatttatggtagattatataatggaatcctgagttctgagagatcaaaggaaaatgctggctctttcttcatccattctcttaggtcaagcctatgcagcaagaagccaagttgagaattgagcaattatctgaagtgggcagtggagacggccaaaccagataatatataaccagaaagtcaccgtggagggaaaatgtggactgaaaataggataaggggtggaggtagaatgtcaagccatttggtcagtgtccacagtccaaatttactgaataacagccaattccttacttcatgtggttatttagagcgagactagaggacaagtgaaaaaaaaaaaaaagagttcattcctaaggttgttgcatgtttgtgcaaaatttcttcaaatctctgttattatctgttacatgtctaattctgagtacttccagagattgcatttcattactttagattagtgggttgaagtggtggaggaagcccatataatctgacttacatggagaaaacaagtctttttttatagtttagttgagtgttatatttaattagcctttttttccctccataatgcatgcttatgaattttccacttaaaattctgaggctctgacctttatcatttcctcatggagcaatttctgtacctccttaactttagtagaacatagcaatgaaatatacaagtcccctagaatagaatttgtgtgaatttggttttctaaaaacacaactaccaaagtctgaggaccagtgtggtatttttttcttctatttgatatggaaaccataaactacttactttgagcagatgtttcccagtcctaaaatacagctatcagtccactggcccctataaatctgttggagtgcacctgctaattctgaagcctccctaatacaatgttaaactttccttttttttttttttttttttttgagaaaaaaattgtaaattaggttcactgttgcttggaattaggaaaaaataaaaacacaggcatactaatatttcagatggaaaaacaaagttaagaattcaacaagtttttttcccccactctatcatgtcttgcacatttaaagctgttatacaacattttaaaaacaaaccaaaaaaacccagggcctttttccaacagcttaggctgatgacccacagtaaaaaagtgccccatgggatattcttaaagcaccccaagggagtctattgaaataacttaaagtaaaaattcagaagaattttacatgtaattaaaaattaagaacgttgttttataagcaatagggaaaagctgtattaagttgcattgctcaatttctcacttgctctgtgcagtgactgctttttcaaccatgtaacaacgtctgaatcttcgtggtaaaatcatacctatcacagccacagcaggttttgttctgctgctgcacatgtgatttgagatactgtgggctgggagtttttttttttttaatttctaatggcaaaatggatctatagaaatggaagtcatctgtaatctcagcactttgagaggctgaggtgggtggatcaccggaggtcaggaattggagaccagcccagccaacatggtgaaacccatctctactaaaaagataaaaaattagctggcgggcgtggtggtgtgcgcctgtagtcccagctacttgggaggctgaggcagaagaaatgcttgaacccaggaggtggaggttgcagtgagccgagaccgcaccgttgcactccaatctgggtggcaagagcgacactacatctcaaaaaaaaaaaaaaaaaaaaaaagaagaagaagaaatggaagtcatcccgtgggcctgagttggtgtagtggattatggcctgtgcgtgaatgaagaaatacttgccaatggcatcagtggtaactagcttaagccctactcagctttgtaaaataatgtaatcaaggaatttgatctgaacaggtaagccaaacattgattcttcagtgcctattgataagtgagactacttttctttttaacagccttatttcacttaagtggggagtcaaactagctttaattaaggaaatctgtagaaatcacccacatctccctttccttctctgttaaaaaaacaaaaggaagaagaaaactaggaaggagtaagcacaaagatctcttcacattctccgggactgcggtaccaaatatcagcacagcacttcttgaaaaaggatgtagattttaatctgaactttgaaccatcactgaggtatgtgtgaacatactagtttcctctttctctctcctgactttgtccgtgaattgataagatctaatttggtcatcagtttggagaacgatttttcatttaatttctttcattatcaagtgtgtattgtcaggggcttagcagtacacctactatctgatgggcactctacatgcgttgcttaggttgaaattaaggatacaatctgtgcactaccaccatttaaaaaaatccccaagtctactgtgtgggtgaggtttctttgcatagtatcagagaggttaaccaatttatttacatactcaatagtccactctaagtagggaaaatccaagctttttttttcttaagaaagagcttttcattcttttttccctcagagctttaccatagtttccagcaagtgaaaacatttcttgatttgaatttcacaacctccttctcctcttgccagttgtatggtgctaataggaagcaaaatgtgagtgtgcttttaatttaaccctaaaataggggaatatcttcagaatttagactttacatattcagtgacctacctaaaaatagagacatagttctaaccttctcaatcattaagaaacatttctattgaatttaattattcaaaacaacaggtagcagtttcacaagggaaaagacaagccatgccacttgtatttgtggtcaccaagtaattacattattttttatttaaaattaagataaaataacttactgactgtcaagtccatttctcatttcctccatagaacattttaaaactagttcacaaacctcttgaaaagtcatgcctctagaaagtgcaaattgtcaccattgcctagaagccaacttgagaggctgtgtatctatgcagcattttgcaaatccagtagcaggcatgtgatataaaagattaaatgcacccctgatttgtgaatactatcctagccttcaaaatgttcaaaagcacaggaagtctgcacttttaaaaatataacctgcccaaattgcaagggaggggttgggtgtaggacctaggtctgtctgccaatcagcttgagatgccagtggacgaaacctgacttcactaaaaaccagactggcaaatattactcagcgtggtaatttcctaattgtagaactggcctgtttggtgaagtatttcaggaaaatttttagctggaccttttctaccctactgcataagaaatgaaggtttctaggcaaagactttacttagtgactaaccaaaaatggtaaataaagtcaccacttccaggcttagctactgtcctcaaaacagctgcaggactggtcaggccagtcttctgaggctggaggtgcatgtggaacccccagagccttgtctgcaagggcatggctgactgcaggctgtttagaagcaccccgccccgtgaaactcctctggcttaggaattttaaacagttctagttctaatctctctgctcagagtctgagcagctgtgaatgagctctcctgtgaatcacagaaatgttaatgggtgagctgctctagcttcttacttccaagtggaaggcgcctgtagctctttgccagcttgatgcagtgagtttgattcctcttttgggcagcagggagagataatgaaggagggggaaaaaagattttaatatagaaacgagtcttccatctggctgaggctgaacaaagtagaagaaccagtgcaagtcactgggggtatggatctcataccattttcagcatatacctccctttctctctttttgattctacacatgtcagtccctgagtagtcttgcattgctttccccactttgaagtcttagatccaaaactttgattccagaaaggtctaaggtgctgttgctgagattttgaaagagacctgagacaaactgttgggattctagacgctattgcgcatctgcctgggtaactgtgtcacttaggttgggtcaccagaataattctcctccatttttgctgcctttccaatttataaacaacacagaacatcagtggttctcccataatcaaatatatttggctctattaatattaaaatttgatcttgagtagaaagattctaagggctaaaaaataaaagatgtaaaatgtatgttgataggttagtgtagaagccacccatggggttgcccccactcccactctttcatattttttttaagaaacaacactcaagttacaaagtcgattctttttttgttttgttttatttgagactgagtctcactctgtcaccacccaggctggagtgcagtggtgcgatcttggctcactgcaacctctgcctccccggttcaagcgatttttcctgcctcagcctcccaagtagctgggattacaggtgcccgccaccacacccagctaatttttgtatttttagtagagatagagacagggtttcactatgtttcaccatgttgaccaggctggtcttgaactcctgacctcaggtgatccacccgcctcagcctcccaaagtgttgggattacaggcgtgagccaacgcccctggccacaaaagtcaattcttaacttaaaacataaaagttccatttcttttatggtctacttagtcatgtctggagtcagtgagctcagtcaagtagtttgcagaatgacagttgtgatacctattcatttacccaccagattattttctgctctccatggcactttatagaaaacagtttattcggtcattacaacagctctaggagggggtttcattaaacccactttctaggaaagcgaactaaggcttagaaaaatcaagtaatttgctaaagactacccagctggcaatgatatgacaggacatgaacttaggacaataactcaaggtcttggtccctgtaaatatgggtttccaggttatgtatgcaggcagagggcttagatcctgaagtttccttcagaaacttcaggatctaagccctctatataggagcagtataaaaaggaaggatctcttcccatagggagcttgtcatccattgaatgaggaactcagacttccactgtgaaatgatatttgtatccccattgtgtgcgagatatggggactctgatcatcataagagcacatttttcctgcctataaatgatacttaatagagctgacagattatatatatctggaacacttttacctagcagaaagacaacaggctaggattagctgactaataattttatttatcaagctcaattcccatgctgacttctcttcctctagtgaaaatgtgtcatcagatttggtcccaaactggagaggtgaaaggatcctttgaccagtataatagccatgccatcagttttgctttcctaattaagttttatatgggttaatgatctatatcattattttgggggtttctaaacacatatgaactaaagatggaaaagatgatggaaaagatggaaagaagatgactcagatgtacaaaggcttgcagagagaaggataagccaaaaaattggtaaatcacacatgaataatcaagaactgactacaatataataatatgtgtccatttccactaatgaataagctgccattatgtctcttcattctctatttaggacaaattacttctctgctgtatttccattcttacaggtacctatctgctgtgatttttcccagttttgactttatcttgttgctttaatcttgtctctaagtaagctgcaacccagtaaatatattccagtattgtttattgtaattcctgcctttatgtcaggtggcaagaggaagggactggttttattaatttatcagtctgggtgtgtgctaagaggatccttagtacatgctttgattatggtagattgagtctaaaagattcagctggtttattccatttattttggtctgtctacctaacaaggtcacacagtggattatactagttttctatgtgtcatattgttggcctgacacataatagcaaataagaggtaccagaattttctgtacagtctgaagctgtgtgtgtacaacaaccagtgaaaaatcttagttatttggacttttgggttccatgatgccagagaaagccagacaccagcagctggaatcagctaagacctaagaccctgcatgcacatatagatgtttacattttcttcctattgcgacattcagccattgctttggcgcctatttcaataatatattgctgctcatcaaagtggaaataatgttttgttactagctgagtattgaaaagctcttcatagttttgtgattttgactcagctccaacatgcaggacccatttcttcaactgactttggcaacaggagagattgactagtgggcttgaaagtgatccactgctgtttctgtttaactttcttcaatcctactgggtcttgggaagaagaggtagcgggcatccttgtttgcctcaaccaggaagcacaaggccatcccagggcggggcaggagagaggtgggagggaagaagcaggctccacagggccattgtttaccttgttggcgggtcaggtcttctcagggtagggttcctgggataagagcaaagcttattggttttccttgctgtgccacgagagcacaccagatcacccctgcagccttgcttgccttcccacagcctgcccttgcctagggtttcagctgatatcctttctactcaggaggagaaaccacagaacacatggaggaagtgtttccagtgttaagactttagaccaaactatagaaatctgttctacctggaaacctgaagaaataaatcatgactgctattcagtagaagtaaaataaaaaaacagctttactggtttggaatcataggaaggctttctgtatagcctctctgagagctgcctattggaaggatttgtcctcaaaacgtgaggatttgtggtgttccagggtttatatgacactggcaggatagtttgctagagggctgtgcttcgacctttatccaagggatgtaagccgtgtgtttaggttagtgagcgtctagcacaaagctctaatgttgaaggagcattggaggcaggctgtgcctctgaacatgtagaattgactagaaatgccaatgttcatttcaaaatgaaatcattatctttcttatgcttccatttaaaaatgattattacatttttgcatatggttgaatgcatattaattttagcaagtttagaaaagagataagcataaagacatacataaaaatcacttattctcatcagctatagataatcactaacaatattttaggacattttcttttcatctttttcttagcaatatgtatgtgtgtgggtatacatatttaagtgtgtatatatgtaaattaaaaaacataaaatattcccacaatataattaataaaaatctaagatacaacacaatttccgtttgtaatatgtagtgtatatatgtatatatacacattatatgtatatataaaatacatgcataaaatagatacacaggtatatattttgcaaattgaaatgatgttgtatcttgtagattttatttaacattagaatttatttacactacttaggtgttttaacaaggattgtggtccaccatttatttccttaagagtaattccaaaaagtggaaatagaatgtcaaggggcaaagttctttataaagtccttaaggagtattgccagatatatttttttttacttccttttaaaacatgattgtattgtagaagttctctttaaaaattccaagcaaaaatttttcaaaatcccatctagaaatcaaatcatgattttatttggctatgcctcttgtagtccttgtctatgaacttattctattattaaatataataggtaatttccactaatttgacagatagaattttattttttacattttctcttgttacagtgccatgcatatttctattatgttacagagatcttgggggtcttttttcctccctttttcctttctcttttcttgttctgtaccccttcacagaaaccaacaaatacaggttgatgtgtatcctctactcttttctccatgctcacacaacccaatatttacacatgcactgatttttcagggcaatggtccttctttatcataaattgtgggataaggttatatacataatatatgtgtgtgtgtattactctgaatcttggttttgtcactttgcaatatgtcttaaagattctgataaatcttatagatctatctcattcttttcagtagttgcatgcagtataaatttactataacttattcaagtaatctgctttcagctgatactctgttgtgaacagttttcaacatataaaaaagtgctgtcattacaaatattcttagatatatattcttagtaattgggggttttattgttatggtgtaagtcccaggagtagaattgctggtttaaaaggtatgtgtatttttacatttctattggttttttcatattattttctaaaaatattatagcaaatcacagtcccactagtgatgttggagagtatcattttcctcactagtactcctatttccctgctttctaatctttcctgatctaatgagtaagcattgttaattttcttttcattttcttgacttctaatgagcttaagcatcttttcacattattgttgttcctttggattttcttatctgtcaattaccaatggatatccttgacctatttctcccttatatggttgcttttctcttattaaaaatttgtaaaagttctttgactattacagattttaaaaactggcagataaagttgtatgatttattgtgtataatatgatattttgagatatacatatatcttgatatatcaatatcgagatatatatatcacacgttgtggaatggctaaatatagctaattaacatgtgcgttacctcatgaagttatcatttttgtggtgagaacacttaaaacctctcagcatttttcaagaatataatatattgttattaactatagtcaccatgttgtacagtggatctcttgcacttacttttccgatttaactgaagttttgcatcctttgaccaatgtctttccaaccctcacctcccacccctctgcccgacactgccccagccccggtaaccaccattctactctctatgtctatgagatcaacctttttagactctacatataagtgagatcttttggtatttgtctttctgtgcctggcttatttcacttaatataatgtgctccaggttcatccgtgttgttgcaaatgacaatatttttctctttttttaaggctgaatggtattccactgtgaacatataccatattttctttatccattcatctgttgatggatacttagattgattctacatcttggctattatgaataatgctgtaataaacatgggagtgcagatatggctttgacatactgaatacattcgctttgggcatatacccagtagtgggactgctgagtcattcggtaattgtatgattactgttttccatagtggctgtactaacataccttcccactaacagtgtgcaagggttctctttactccgcatccttgccaacacttttaatcttttgtccttttcataatacccattctaacaggtgtgagatgatatctctttgtggttttaatttccattttctgatgattatagtgatgctgagcattttttctatagattttttttttttggtcagtggattgctaaatcttaccccgtcaataatttctcctttgattttacttttataattttctgctacaaaattaaaaaataattgtatgaaataaaatttttcttcctatacgtattctgaatttcctatcttacttcaaagagtcttcccacctcctattttctaaaattttcttctaaaaatttctatgttttattttattatttttaatatttagtattttttacatctggaatttttttatataaaagtggaaggctcaactgcatctctttttatataaagaacgaattgtttaaacatcacatgttaaataatcttttctccaataaattaaattatattagcatcaatttaaagattttttttctctaaaccactaatctatttatttgttgccaggcctgagacgtattgctttgattataatagctgtatagtctcttttaacatttggcaagtttgatgctccctactcattaatattatttataatgttagcctggttttcctttttttttttcagtccaaataggatttagtcagaagaaagatacgtggattacatttttaaaatactgatcaaaatgaagatgctccaaccgtataaatggcagatgaaatagactttaaagtaaaaaatatttatcacacaatatatcagaaaaatataacaaacccgaaccaacaaacatcagcaacgtagctccaaaatattagcttgaaacatgaaattgccaatagttgaccactttttgacctacaaaagcaacaatttatataaagaaaaggtcaataaaattatggtaaattgaatttttttttattattacactttaagttctgtgatacatgtgcagaacgtgcaggtttgttacacaggtatacacatgccatggtggtttgctgcacccatcaacccgtcatctacattaagtatttctcctattgctatccctcccctagccccccaccctctgacaggccccagtgtgtgatgttcccctccctgtgtccttaggttcccacttatgagtgtggcgtttggtttgatgttcctgtgttagtttgctgagaatgatgattgccagcttcatccatgtccctacaaaggacatgaactcatcctttttaatggctgcatagtattccatggtgtatatgtgccacattttcttaatccagtctatcattgatgggcatttgggttggttccaagtctttgctattgtgaataatgctgcaataaacatacatgtgcatgtgtctttatagtagaatgacttataatcctttgggtatatacccagtaatgggattgctgggtcaaacggtatttctagttctagatccttgagaaattgccacactgtcttccacaatggttgaactaatttacactcccaccaacagtgtaaaagcattcttatttctccacatcctccccagcatctgttgtttcctgactttttttttttttttgagatggagtctcactctgttgcccaggctggagtgcagtggtgcaatcttggctcactgcaagctccacctcccgggttcatgccattctcctgcttcagcctcccaagtagctgggactacaggcgcccgccatcatgcccagctaattttttgtatttttagtagagacggggtttcactgtgttagccaggatggtctcgatcttctgacctcgtgatccacctgccttggcctcccaaagtgctaggattacaggcgtgagccaccgcacctggcctgtttccagactttttaatgatcaccattctaactggtgtgagatggtatctcattgtggttttgatttgcatttctctaatgaccagtgatgatgagctttttttcatatgtttgttggccgcataaatgacttcctttgagaagtgtctgttcatatccttcacccactttttgatggggttgtttgttttcttgtatatttgtttaagttcttgtagatattagccctttgtcagatggagagattacgaaatttttcccccattctgtaggttgcctgttcatgctgatgatagtttcttttgctatgcagaagctgtttagtttaattagatcccattcgtcaattttgccttttgttgccattgcttttggtgttttagtcatgaagtctttgtccatgcctgtgtcctaaatggtattgcgttggttttcttctagggtttttatggtttcgggtcttacatttaagtttttaatcttgagttaatttttgtataaggtgtaaggaagggatccagtttcagttttctgcatatggctcgccagttttcccatcaccatttattaaatagggaatcctttccccattgcttgtttttgtcaggtttgccaaagatcagatggttgtagatgtgtggcgttatttctgaggcctctgttctgttccactggtttatatatctgttttggtaccagtaccatgctgttttggttaccgtagccttgtagtatagtttgaagttaggtagcatgatccctccagctttcttttagcataggattttcttggctatacgggcttttttttggttccatatgaaatttaaagtagttttttctaattctatgaagaaagtcaatggtagcctgatggggatagcattgaatctattaattacttttggcagtgtggccattttcatgatattgattcttcctatccaagagcatcgaatgtttttccatttctttgtgtcctctcgtttttccttgagcagtggtttgtagttctccttgaagaggtccttcacttcccttgtaagttgtcttcctacatgttttattctctttgtagcaattgtgaatggaagtgcactcatgatttggctctctgtttgttattactgtataggaattcttgtgatttttgcacattgattttgtatcctgagactttgctgaagttgcttttcagattaaggagattttgggttgagatgatggggttttctaaatatacaatcatgtcatctgcaaacagagacaatttaacttcctctcttcctatttgaataccctcaatttctttcttttgcctgattgccctggccagaacttccaatactatgttgaataggagtggtgaaagaggatatccttgtctggtgctggttttcaaagggaattcttccagcttttgcccattcagtatagtattagctgtgggcttgtcatgaatatctcttattattttgaggtatgttccatcaatgcctactttgttgagagtttttagcacgaaggggtgttgaattttattgaaggcctttttttcatctattgagataatcatgtggtttttgtcattggttctgtttatgtgatggattacatttactgatttgtgtatgttgaaccagccttgcatcccagggatgaagctgacttgattgtggtggacaagctttttgatgtgctgctgggttcagtttgccagtattttatcgaggatttttgcatcaatgttcatcagagatattggcctgaaattttctttttttgttgtgtctctgccaagttttggtatcaggatgatgctggcctcataaaatgagttagggaggagtccctctttttctattgtttggaataatttcagaaggaatggtaccagctcctctttgtacctctggtagaattcggatgtgaatccatcttgtcctgggctttttttggttggtaggctattaattcctgcctcaatttcagaacttgttattggtctgttcagggatttgacttcttcctggtttagtcttgggagggcgtatgtgtccaggaatttatccatttcttctggattttctagtttatttgcgcagaggtgtttatagtattctctgatggtagtttgtatttctgtgggattgctggtgatattccctttatcatattttagtgtgtctatttgatttttctcttttcttctttattagtctggctagcagtctatctattttgttaatcttttcaaaaaaccagctcctgtgttcattgatttttttttgaagtttattttgtgtctctgtctccttcagttctgctctgatcttagttatttcttgtcttctgctagcttttgaatgtgtttgctcttgcttctctagttcttttaattgtgatgttagggtgtcagtttgagatctttcctgctttctcttgtgggcatttagtgctataaatttccctctaaacactgctttagctgtgtcccagagattctggtatgttctgtctttgttctcattggtttcaaagaacttatttatttctgccttaattctgtcatttacacagtagtcattcaggagcaggttattcactttccatgtagttgtgcagttttgagtgagtttcttaatcctgagttctaatttgattgcagtgtggtctgagagactgttaggatttccattcttttgcatttgctgaggagtgttttacttctaattatgtggtcaattttagaataagtgtgatgtggtgctaagaagaatgtatgttctcttggtttggggtggagacttctatagatgtctattaggtctgcttggtccagaggtgagttcaagtcctgaatatccttgttaattttctgtctcattgatctgtttaatattgacagtggggtgttaaagtctcccgctattattgtgtgagaatctaagtctctttgtaggtctctaagaacttgctttatgaatctgggtgctgctgtattgggtgcatatatatttaggatagttagctcttctcgttgcattgatacctttaccattatgtaatgcccttctttgtcttttttgatctttgttggtttaaagtctgttttatcagagactaggactgcaacccctgctttttttttgctctccatttgcttggtaaatcttccgccattcctttattttgagcctatgtgtatctttgcatgtgatatgggtctcctgaatacagcacaccaatgggtcttgactctttatccagtttgccagtctgtgtcttttaactggggcatttaacctgtttacatttaagattaatatttttatgtgtgaatttgatcctgtcattatgatgctagctggttattttgcccattagttgatgcagtttctcgtagtgttgatggtctttacaatttggtatgtttttgcagtggttggtaccagttttacctttccatatttagtgtttcttttaggagctcttgtaaggcaggcctggtggtgagaaaatctctcagcatttgcttgtctgtaaaggatcttatttctctttcacttatgaagcttagtttggctggatatgaaattctaggttaaaaattcttttctttaagaatgttgaatattggcccccactctcttctggcttgcaaggtttctgcagagtgatccactgttagtctgatgggcttccctttgtgggtaacacgacctttctctctggctgcacttaacattttttccttcatttcaaccttggtgaatctgacaattatgtgtcttggggttgctcttctcgagagtatctttgtgatgttctctgtatttcctgaatttgaatgttggcctgtcttgctaggttggggaagttctcctggataatatcctgaaaagtgttttccaacttggttccattctttctgtcactttcaggtacatcatcaaatataggtttggtcttttcacatagtcccatatttcttggaggctttgttcattccttttcactctttcttctctaatcttgtcttcatgctttatttcaagttgatcttcaatctctgatatcctttcttttgcttgattgattcagctattgatacttgtgtatgcttcataaagttcttgtgctgtgtttctcagctccatcaggtcatttatgttctgctctaaactggttattgtagttagcaattcctctatccttttttcaaggttcttagcttccttgccttgggttagaacatgcttcttcagctcagaggagtttgttattactcaccttctgaagccggcttctgtcaattcatcaaactcattctccatccaattttgttcccttgctggcaaggagttgtgatcctttggaggagaagaggtgttttggtttttggaattgtcagcctttttgtactggtttattctcatcttcatggatttatctacctttggtctttgatgttggtgacctttggatggggtttctgtgtggatgtcctttttgttgatattaatgctattcctttctgtttgttagttttccttctaacagtcaggcccctctgctgcaggtctgctggagtttgctggaggtctactccaaaccctgtttgtctgggtatggaggctgcaaaacagcaaagattgctgcctgttccttcctctggaagctttgtcccagaggggcacccaccagatgccagccagagctctcctgtatgaggtgtctgtcaacccctgctgggaggtgtctcccagtcaggaggcacaggagtctgggacccacttgagcaggtagtctgtcccttagcagagctcaaatattgtgctgggggatccgtttctctcttcagagccagcaggcaggaatgtttaaatctgctgaagctgtgctcacagccgccgcttcccccaggtgctctgtcccagggagatgggagttttatctataagcccctgactgggactgctgcctttctttcagtgatgcccttcccagagagcaggaatctagagagacagtctggctacagcagctttgctgagctgcgatgtgcttcacccagtttgaacttcctggtggctttgtttacactgtgacaggaaaactgcctactcaagcctcagtaatggcggatgcccctccccccaccaagcttgagcatcccaggtcaagttctgactgctgtgctggcagcgagaatttcaagctcatggatcttagcttgctgggctctgtgggggtgggatccactgagctagaacattggctccctggcttcagcccccttttctggggagtgaatggttctgtctcgctggcattccaggagccactagggtatgaaaaacaaaaactcctgtagctagttcggtgtctgaccaaatggctgcccagtttttgcttgaaacccagggccctggaggcataggcacccaagggagtctcctggtctgcacccaagggaatctcctggtctgtgtgtttcaaagaccatgggaaaagtgtagtatctgggcaggagtgcaccgttccttagggcacagtccctcagggcttcccttggctaggggagggagttccctgaccccttgggattcccaggtgaggcgatgccccaccctgctttggctcaccctctgtgggctgcacccactgtctaaccagtcccaatgagatgagctgggtacctcagttggaaatgcagaaatcacctgtcttctgcgttaatctcactgggagctgcagactggagctgttcctatttggccatcttgccccttggtctggttttcaaccttcagtcttccatatttattttgaatgaattttctgcagctttattaaaaaagaatagaaacaagtaagagcaaagcatagttggtttatggttgtaataaacttatatgtatgtcctaatgatttgacagctttgtgatagtatcttgtaatccaagtacatgatatatttctacattatttagatcttgtgttaggtttttccataagattaattttcttcatattggctttcttgctatgtttctttttagcataaagctaatccaggaaaaggaataaaactggaaggaaaaaatgtcttaaaccattaatattggctgaccccggtggtagggttatgaatgaaacatttttgcttcttccacttttttatattttccaaattgtccatattaatcatgtatgatttttataataataaattaatgaaatttaagaattagataattgattgaattggataattgaattaataaaatttaagaatgagaataggaataattgtgctttgaaaagtcatatacacaagagttttagatggaattcaatactaaatttatatgctatactaaatcagtaattctcaaggagcaaaggtgctggggagtgtggaggagctctttgttggtgttgcacatacaatttaagacaacattttccttattcctcaccattttaaccatatcacctaaccagcctctggtagcactcaatagacatctgatgaatgaatgaataagtgaatgaaaacattgtgacaaaatggtataacattttgtatttgaaaaatatatgaaaatctattcttttcaaatataaaatgggaaaataaaattcaataaaaatatcttggttggtgagaatacacaaaagatataccttcttgtctatgaattagtaataagaaattgtcttgaggaagtcaactacatctggaaggttctctctggacaaggagcataagtgaaaaacagtgcactaaattataaccaagagttgcaacttaccattttaatgcttcagcacaggcacagagactaacatttactaagcaaacaagaagtcttggcaagttaattaaataatgaattatttttggtgaccaaggagttgggcttctcattttaaaaccatgcatgagatttttccctttctacccattactaaaatatcgtattagtgtgaaaaattataccaggactgggagaaaaagaaatcacatctgtccttgacaatgggctgaatgaagaggtgaaggagtggttttactatctaagtgactgaaaaataggttatggtgccccagcaaatccttgttgtttgctgacaattagtgatgtctgtttaaatcatgcagttttattaggccttaaaaatatcttttagttagtttcaatttcatcaagggaaaaggagagcagagtagagtggaactctgctcagagtccggttggaagccttcaactttgttctccctgttttcagatgagtgtctatttgtggctctaccttttctctttcttctcttaccatgacactcccctcttctctcttatcttagctgttcttttcttcttccgcatattaggcagtgggagaaacaccctaaatcagttggaggtgaggaaagaagaaaagcacccctatcttggtagttcctcattcttcccttcgtcacgtccatgtcatcaggctctgccttcatctgcgatctggatacaatccaatttatagcatccattcaaccaaaaaatattgagctcttactatgtcaaagtagtgttctggatgctcggctccatcagtaaacaacctagactaacatcttgccgttgtttacatctcgtggtgtagagtttacaccttgtggtctagaatttacatcttgtggtggaggcaggcagatgattaacaataaacttaagtaggtctagatgtcaaaaggtggtaaatgctacaggaaagagcaaaggtcgagccaggtaaggcagattggctgtgtgggtgtggaggaagggtgcaagagtactgtcaagataagccttcctgagaacatctgaaccaggacatgaaggacatgaggaagtgagacagtcgctatccagggaaggaatttccaggcagaagaaagagccagtgttacgccttaaggtgggagcatttctgcgagactggagaatcactggagtccattgtacttggagcccagcaagggagaaaagattggaggactcaggaggtgctggggcaggtgaactgctttttgattggggagttcagagggtaatgctttggataaatgtaactgaaaactttctcagaagtgttttcatactatctctacaattcattttcatgtgaaaacttaattggcgagcagattaatatggtgatcttcccttagatcactaggaaaatcttgttttatgaatttttcttcccttttcattcactagcagagaaaagagttgtaaaggagccgcagaaaattatagtaggtttctccctactactgagctactgagactggaagatgctcacgttagcaactgagtatatttatgtatttccctttaatgtttgaagggtcaggaatatttgacttaggatactagtctgtttagaaacatgattcaactagctacatgactaaactagcagctgtcagagagaatgcaaggtcaaaacttagtagttgataataataaagaaagggcagagtgttatgaaatgttatgatctgggtaatccattggctcacttttttttgtcagcctaaggttacaagatgataaattaagttgctaatattctatatctaccatttacttttcctttatcatgtgtctggcaatatgctgagtgttctacctctagcattttattcaaactgtgcaatctgcctgctgaaacaagtatcattaacttcatttcctaaggtgagaaaattgaggcccagagaggttaaataagtttaggatcatatgcatagctggtaagtactatactttaatatccctttgccttcatgctttgctctcactccatgtttaaatgagcagagagacttatctttaaacagatatatagcaagtagtattttccaaatgaattccacaagatgctccattgcaaaagttcaaataagtttagaaaaatgctgcaaactttgtgcttcttaagagatttacagtgcagattagcacattaaagcctttgggaaatttgtattagaaaaacctttattaacttatttaccccaatttttccaagctttttgatcacgaaactctttaaaaaacaacaagtataattgcttttatagtattctttgggatacacttggagaagtgttacatgaaaagatatgattggataaatttaaatataggaagaattatttaatcattttttggaataaaacaccaattttaggttgtctaacatacatttgagccaagacatgaaggacatgaggacataatttacttttgtccttgtaaggacataatgcacttttagtggtttgcattgtttattttcttttgaatttcatgttactttataaaggtaattatttaatcaaaccatttgttaagtgtcagacactatggtaggtgctggtaatataaagagaatatgtaaacatcaacacaacatatctcctagtatgggcttacagtacagtgagagacacaaacaaataatttgtaggattgaaataagtcttacatttgccacatcaataaagcactatggaaacaaaggcacaagaacttaactttgtccaatgaagtctttcaggaggaggtgatattggagctgaattttaaaggattcatagatgtttatctgaaggactaatgcaacatgttggaggtgagtcttcaggaaagaggcaacaagaaccatttgggtaacaagataggacttggcaagttaggggagtcgtaagtggttcattacggctagaatccagggctctctggagagattgggagtacacagatcactcaagggtttggtatgaactgtcaggctactaagacagaaataacaaaaatcagatgtgggtttagaaagagcattttggctgtaatacagaacatgatggataattgatggagcgagattcctggggagatagaagaggatagggccatgtaagtacatctgctggtattttaaaattagaaaaagaaatttttggtagcaaaatcagaacagacccaccaactctttgcaaatcatgggactagaatgtttggaaaggaagatgctaacgattttcattcatttgtttatcatctatgttgagtgtcttcttgggcctaggcagcatgcccaaagctgggagaataagatactgtatgagatgctagaaagatccccacctctcctttccagaaattcagtatatcagactaattggtttacagttgtgaccatgggcttttggcatagctgttcaacaagatttcattctttttcaaaagcaattcattcatccaccaaatatttgttaaacaaatgtacgttgcattgtagtgggtcctcagggagctggatgtacatgccaaatatgtttcattttatttgaagcaagtccacagacaagtaaactagtcaagtgataccaggcaaagtgatttgctttccaacagatggtgacagattaatttcctaagagactgatctgccccagaggcactgggaaagtcttgttagggaggtagattatagtcaggaccttggaaaattgttgggaataattgaggtcaggaagggtatacttaggtggatggggacagcccctgaacgagggatcagtccttttggagtgagcacggaatattcaggtgcctgggaggagtgaaggcttgtgcttcagcactgattgtgtgcaccgatggtggaacatacctgcctgctcagaagctttggcttctctctgtaggtgagagacagccattagaagtccttgaacagggaagaaacacggtgaaagcaaggatttcattgagaagtccctcatggaagaagaagattacattggaaagagcctggcttagggagggagcagtgacaatcagagaaaaaggcagataggggcaaagatactggaagaagaggaaaaactgtccaaagctttgtccttgtgtgggaaagctggtgctgttggcgtgaaagaggaagcaagaacatgtgcactgacacggctgagagtctccaaaaccattgtctttccttaaaacagtaatgatcacaagcagcttacaactttgcatatagccactggggcaaaatcctattaaaagctaattcattatctgagccagtgcatgataatgcgatgtaaaggcgtgttgggaggcagatgatcagaacttttaagcaaactaaatttcataacatttattagaagcctgtctctatttccagaaaacgcctataaatgtggctgtaatgtaggctacaggtcatcacactgaagtagaagcaatgtacaatacctgaaaggttagagaagttcagggtctgggcttataaaaaacttcattattcatttgaaagatattgttttgtatcccccaattgtggttttcaatgtatataaaagcaggatatcatactttttgatctatggatttggaaggggataatggtgtggtgggcactgagcatatggaattatttaattagagagatgccctttagattactataaaatataaccagaatctcctgtttagacttctaaaatctacttctttgaaaacactactaaaatgaccacaaagacctgtcctcacaagtgggagctattaatcaatagtgtgtacacatggacatagagagcagaataataaacactggagactctgaggggtgggaggggaagagggaggtgagggatgagaaattacttgatgggtacaatctacactattctggtgattgatttctctctgtttcctcttcagaaactgagaggaaatttagtttcctcagtcaccactcctccaaactcctgcgtgggtgatacaagacttgctgtcatcttgaggcagaaggggttaggggatttccccattgaacctgatagccttcatttcatttctgtcttctcagggaaacatttacccctctttactaaatggaagaaggtttgtaaactaggagggtatctatggatctgattgctccttcaccactctgctatatatccatgtaacaaaacagcgcttgtggccggatacagtggctcacacctgtaatcccagcactttgggaggccgaggtggtcggatcacctgaggtcaggagttcgagaccagtctggccaatacggtgaaaccctgtctctactaaaaatacaaaaattagctgggcgtggtggagcattcctgtaatccttagctactcgggaggctgaggcaggagaatcgcttgaacccgggaggccgaggttgcagtgagccgagatcatgccactgcactccagcctgggtgacagagcaagactccatcgtgggaaaacaaacaaacaaaagaacagtgctggtaccccctaaatctataaaattttctaaaaaataaaatgacaataaaggaatgaaaaaggcataggtacaagcagatgggataggacactaaagcaagctggagtaatactggaattctagaaggtagaaggcttagcagagcagttcaggtggaacccacgcctgtgggggcaggggcatgagcagtgagcccatctaactacgggaccccagataggcttgggatctagaagcgacagatgcctctaaaggctgggggtaggctgggactgaaagcagaattggtgtaaagtctttaaaaggagcaattagatccacaaataccttcctagtttctaattattctaccgcttaggagagaggggtaaatgactccctgaaaacagagaaatgaagtgaaggctatcatgttaaatggggacaacacctagcccctccttcctcaagactgacaggaaagctcctacaacccacgaaggagtttggaggggtgttgtctgaggaaactaataagtccaagagaaagaaccttcagaaacggacatttaaaggattaggtccccacccgattaccctagagatacacatacagaaatgtgattggacagtcaaggatcaccgtatgatgcttctaacctgaacaatagacacctagtcacacacccaaacaatcacacacacacatacacacacacacacacacacttacttcacttctgctggaggaatttacaagatgaagaacatcttgtatctcttttgggctactgtttgtgaaaggaatggttgcatgtgctcttggctaagccaactccatcctgaagacagatttttgtgaggtgggggaaattcgcccagcgttaatagtgttagtggttgtcctgggtccatcctggtctgtattcctgctttttcattttcagatttaaatccagagttattacagatggtaacatctgatgccaatttatggatctttttcataattcacctgctaggaatctcaggtaacctataaaatatgcttttatttggtcattttaagagttacgtttctgaatttcaggtattttatcctgtattgtcagcacattaaattagggaacacattcattgacattctatgtattttcctttgtatttcaaagtcagagtcaagtatttaaaaagataagatctttcattttgtgtgtgatcccacggaatactttctactgtagatttattaaaattctcccacctctggcctctgattaaggaattgcagagtattctctatgacaactcattaaacctattattccccccagggcggtttagtatatcactaaatatacttttagtgatatttgttgattggagcatagcttttgtgtttgccaaacatcattgatgtgttttgaggtcatgtggttgtggggggcagggggtggttgtaaatgtaatagtgtccctctagtattgtaatacttcaaggacatagaatttattttttaaagtcttaaatctttttgtttgtttttctaggaaatcttgagtctatgttctttgatttgagactatagagtttcttggtaaagtctccaattattggttttctgagtaaattcttgagaattggtgaggctcccaggattattgtttgtcatcctgttctaattaatagagaaaaagcatataaatcttagatgtcttagatctgggactattgcatctacttggcttgagccaaagtgtcatctaatttttatccagtaattgtggcaacatattgcttccaaaacaaatcacatttgtaaatgcatattgagcattttctacatgaagggcattaccagggagtgaaagaaatataaggtctgaattttgtcctctgggagagaacattctagtgggagagatgagttgtgaaaagttaaataacaaatatttatagatggtcaatataggaacttgcaaatattattaagattaattacatgtgaaaaattgttattgaattcaaggcaaaagaagtgaacttaaactgagttgcacaggaagaactcataaaaaggtgagcttgtgttggatgagtggatttgggcagataaagaaagacaggagcaaaaataaagaggtggaaaaccacaggggtgtttgatgtatgcagggcacggaaatcagttgtatggtggggggtaccttcaacttaaaacctctgtaccagttagggtgcttgagttgtaagaagccgaaaccaattctggctcatttaggcggagaaagaatttacaatccatgactaggatatatccctccatctatttaatccctgtttaacttttctttattttttatagtttgtatagttttctatgcagaagacttgcacatctttcgttacatttgttcataagtatttgacacttttatgttattattaaagattttctttttttttttttgagacggagtctcactctgtcgcccaggctggagtgcagtggcgcaatctcggctcactgcaagctccgcctgccgggttcacaccattctcctgcctcagcctcccgagtagctgggactacaggcgcctgccaccacttccggctaatttttgtgtgtgtgtttttagtagagacggggtttcaccgtattagccaggatggtcttgatctcctgatttcgtgatccaaccgcctcggcctcccaaagtgctgggattacaggcgcaagccacagcgcccggtcaagagttttaaaaaaatttcagtttctaactgttgacactacatagaaatacaatagatttttgcatattgtccatgtatctgccaaacttgctaatttaacttattaattataataattttatctatggattcttttggattttccaaatatacaacatgccatatatgagtagtgacatttttatttcttcttcctagctccgtaactttattctattttcttgacctactgcattgactaggatccttcactacaatgggaagaaaaagtgatggtgggcattcttttctcactcctgatcgcagggcagcatttaacttttcaccattatgaatgatgtttgctctacagatttctgtagaaccatttatcagattcaggtagttaatcctaacttggctaacagcaattaaaaaaatgaagtaatataaaaattaagaaattaatatgctgctaatgatatgttgttgagtaacataaatataccaatttttctatatctactgagatgatcatatgaatattgttctttatttactatggtgaattgcattcattaattttcttttctttttttttttgagacagagtcttgctctgtcacccaggctggagtgcagtggtgcagtctgagttcactgtaaccttcacctcctgggtccaagtgattctcctgcctcagtctcccgagtagctgggattataggtgtgcaccatcacgcccggctaatttttatatttttagtagagatggggtttccccatgttggccaggctgatcttgaactcctgacgtcaagtgatctgcctgtctcggcctcccaaagtgctgggattacaggtgtgagccactatgcctggctggattcattaattttcaaatgcattttaaaatttctgaactaaatccaacttgattataatatactatctttttttaagggaaaagtagatgaatcagactcagcaaaaataggagccagaatagcaactgatacggtttgtctatattcccacccaaatctcatcttgaattgtaatctccataacccccacttgtctagggagagatctggtgggaggtgatgggatcatggtggcagtttccctcttgctgttctcgtgatagtgaattctcatgagatctgatagttttataagggcctcttcccccttcgctactcactctgtctctcacctgccaccatgtaagacgtgccttggctactcctttgccatctgccataattatctgagatctccccagccatttggaactgtgagtcagttaaacctcttttctttataaattacccagtctcaggcagttcttcatagcagcgtgaaaattaactaatacagcaaccatggcaggggaaggccaagcaccttgactgagtatatccaatgggagaggagatttttttctcacagccaaatcaggacactcacagctttgtgtttaaaagcttgggctctggactcaggctgcctggtttgaagtgccagtcctccctcttatgtggcaggggaccttagctctgagtatccttctctataaaggaggatgatgttctatttacccaataagattctaaggattaaatgatacattaaagtgcacaggtcagatcactctcagcccatagaagtaattataattccagctattattattgttatttgtgaatatgagaaagaagaaagttcactctgacatcctgtaaatggaaaattcaactgaacattgaaaaatgtttaaatctgtctatcagaaagtttttcatcaaaagaaaacactgagtagtctagtgttgtagcttgatccaaaaccttgaataattttcaaactcatttatgatatctgaaatattcaatgacttatacctttgaattttttggcagctttgtggaggtatagctgacatataagaaactgcagatattcaaaatgtacagttttataagttttgatgtatgtatacaaccattaaaccactaccacaataacataaggaacatacctgccccccatccacacatttgatgcgcctccttttaaaattctctttcctaccctccacccctcactgtttaccaaaaagaatgtctgatggtgccctgggcagtcccactctgcctagaaaacaccatagaaaaagacagcaaaagtgctttctcactctggagttctacttgattttaatggacatagattagtgtgaaccacataaaccagtactaaaatacaggatttgatctagaaaaggtgatgctaaaaatgcatgtagataaaacctaatttttttcagacaccaaaatgaaaaattattagtatgccatgacacatgaacacttttatattccacaaccactgtgctctccttttggtgttcatttgcaatggatggaatgtttatgtcccttccaaatttgtatgttgaaatgctaactctcaagatgatggtattaggaggagaggctgttgagaggtgattaggccatgagggtggaaccctcaagaaaaggattagtgccctcagcaaagaggcctaggagagctagcttgctcttcccagcatttagggacacagcaagagggtgccgtctgtgaactagaaagcaggccctcaccagataccaaatttgccaatgccttggccttggacttcccagcctccagaaccatgagaagtaaatttctgttgtttataagccacctagtctatagtgtgttttgttttagcaggctgaatggactaaggcattatttattgtgagttctattcaccatggagcatatgtggcctatgtgtccctggcactgaggcaggaactgagcagagtacgcaggggaattaataatgcttggacctatctttaaaacacctagagtttagtaggaatcaactggaagtagtagggtaaaggaaagtaggtgacttttgttgagccctgccatgtgctagagactgtgctaaagtgatttacccacattatcttatttgaacctcatggcaagcctgtgtggtaggtcctattcctctatttacagatggggaaactgaagctcagagacattaagtaatttgcccaaggttatagaattatcagcaacaaagctgaaagtggcaaagggctctttctagtcaggaggaattaagagagcttgggtgcagtggctcacatctgtaatcctagcattttgggaggccaaggtgggaggatcagttgagcccaggagtttgagatcagcctgggcaacatagtgagacttcgtctgtacagaaaaaaagaaaaaagaaaaaaagagcttgggatcgtgcctcctgtgactcagcatcaccttagtcttggtctgcctccattctgaattgtgccctaaagctagtcattgcttccttcttggtttctgctacaagtttctgcctctcccactggcccatttccggggttcctgttcctgttatgcacatcaatccctagatttctgaggtcccagagggtgggcttctgcttagtccctgtttgtcttcccagggctaggcatcctggtccttagccctggcactggggcttctctccctgctgccttcgaccccccggggctgaccatctgctgctctatccctgcatcctgccagctttcacatcccctgtctcgagctctgcttgccctttactcttgaggggaactccctgcctccacctgttggactggtctggtcccttcactggtcctgccctttctgaccatcttctactctggtctggcctcccattttccagagctcatctgtctccatgtgtgtcctgcttctcagagggtcttgagttccagcttttccaggtctggctggtgccatggccaaaacctgtcccacctctcccattcgagttcctcactagctcctttttgacagttctttcttttttggggtctagctttggccttgctgcatgaatcattaacacataaatatgtgtcttcacaattaattgtttccatttggtgtttgctctagtcaaggaggatggagagggagcaacatcttgtactgaatgtcttgacatcactaggaactagactgcttgtgcttcccgggcatgctgaggtctcaagaataaagagtatccctgaagacattcttatcagtcttccctggtgaaacattcatcctaatttttccttttagctttgagaccacttttgcatgatttttaatatgtcattaaattaaatagatataattttctctgtctagccaagctgctgttagaagaatctttgcatacaactaatcataaaaaagacattcttcttgcctctttggaaaggagcctgtgtcacctaagagtgaggagtacactcattcttttgtgccttgttcatctgctcaggggattattgattagcagatagaatgtgggtgcaggctggacgcagtggccatgtctgtaatccagcactttgggaggccgagatgggtggattacttgaggtcaggagtttgagaccagcttgtccaacatatagtgaaacccccgtgtctactaaaaatataaaattagctgggcgtggtggtgcatgcctgtagtcccagctacttgggaagctgaggcaggagaatcgcttgaactccggaggtggaggttgcagtgagctgagatcgcgccactgtacaccagcctaggtgacacagtgagactccatctctcaagaaaaaaaaaaaagaaatgtgggggcagataagttttttggggggtttgcttttaattctttggaagaactgggcttggctggctgggcacctagagcaatgtggacatgggcagctgcttgtcccatggatgccagggacagagtcacaagagagacggttagaaatggtgccaggttctcgctgcctcgtgccaggtcagctcccaacaaagcctttgtacaagacacatataaaccctcagagagtttatgctaacccagtgtcttggccatggcttactcatgatggaaaactgatcatattttattctggccacatggaataatagacatgtaatcactatgagatttgagttgcagggtctttggtttctaataacctttataattttctccctcatcagggagacagaataaggtgtttacattactactttcattttgcaagaataagatcgaggttaaatctacagttatgtcttgatagactgcagcagatttctgcatcagtagaaagtgctgttttcccactaatcagaagaagaaagtgctagccataatgatatgggtccactgtgaagtagaagacaagaaacagagcaggacgtggaattgggagcaatgagaaaaggtgcctagagttgctcttggcaccctgcaccttagatcacccttattaactgcctgctgtttactctgaaaatctttctgtcatttttgagagataaaatctgaaaatgcagtttcttcaagttagaaatgataatttttataatagagtttaagaaagccatgcttcttttctcttctatgagaacatttttatttcaattataaaattgccactataaatagccagtcaagttcatagggcatgagtctcatcaggcggataatttacattatataaaaaaagtatgagttatttaactaaactaaaaaagcaaccagtatcttgtggtcacatactgtatgtgatcccttttacttgcaaggtaaaaagtggtttcataaccttgccaatataattccaaagaactaaggacttagtgatcgttgctaattgaagttattctgtttatgagcaagcaacactatttctttgatgaaaaccagaaaggatttacgtgtcggtaaatagggttcctttatgtttgtgtatgtgtgtgtgtttgtgtgtgtgtgtgtgtgtgtgtgattttatgaggtttgtctcattcttctatgctagtgagtgttgattagttggattgccttttcagttgacctattgctttttaagagcatttttggatatagtcccttaacccagaattaacttctatgataaaaacgctttttgggttgtcagagaggctaataggggatatatgggcagggagttttttaccagccgtcagatctcatcttgcagactgtaactactgtaaccatgccccatgaagggtagtacaaatcatgctattgaaattgagagagatggctgccttttggacaggaagagaactagaagtttttgactttgtgaatctaacctctgcagctgcatcccccagggctgctgtccacataccctgtgctccactccctctcatgatttctctcaccaccgtcattctttgtttctcttgttcctttatcctgaagctctcaacctatgaacctgtgaaaagcccagataacagtaacagattacatttatttatggaacatttattatagatggtgtcattttctaagtactttaaccatattgattcctttaatctttgcaatcatgcagtgaaacaggtgattctcatactcccattttacagttgaggaaactgaggcactgaggggtgaaatgacttgtctgggaccacacagtacgtagtcgagctagtatttggacccagactgtctaactcaagagcccaagttattggccaccatactctatagcacctctaacccagatcaaatatacacagcaccatcacatagtgaaattaatcagtgtcatgtccattccctctgcttaattgtatgtttcttgtgatgaggaacataagccatctccaatgcctggggccacacatagcagatgccctataactatcatcattgtcatcgtcattcttatcttcctcttcctcctcatcataatctactacatataaggcaaatttgtgggtcaggcacacttcacataaattagatttaattctcacaacaatcttacgaaatttgtgttgtccccagtttatagttgaaaagaccttgcatttaggaagtggtaaaatgggaatttgcgaccctgccatttggttccagaatccttcctcctaaccactctataccatatgcttaattaagaaaaaaagaaacaaataggtgagaaaaaacaatgatgtgaagaattttgctgcccccagtattaggattttttttcttcttcttgctagactctagagggcccagatcctgtggagctgtctctctgaagggaagggtcaggctgttcaccctgattttcctggagtcacagataaacttctgccctccaccggatgcctctatcttacacaattattttcctttacaaatttggttgatgacatattcacttgggataattgggttgtccctcctactttgaaactgtgagagagttcactcaatttccaactgcgtatgaagctcttgagtcagatttttttgcctgtaacacctcagctcacaccagtgcagaaatggaagttttaattggctgtaggattgaagggttggtttggtgcatggtggtattttaagaaaggcaaagttttatttaaatgaggaatattctccctgggttttttgagttagctactgggccatgcaacaggcctggctgcttgtgagaaaatgagaagggtgatcaagtacaagaagatgcagccaaagaagtggacacaatccacgtcaagttccatcttctttgtggcagccatgattctgaaggtcactgaagggtatttttccctgagctgtttttggagcctgtgccactggcttcaaatgctgggtcttggccacctcagttgctataaaatatggttatgagtgcttccgcttcccagcatctagctgacaaagccccacttgtgccttgctcagccccacttcattgctcctgccctctctggggagagggactcaccacctgggtgacaaggttagggcttcttgctgcactttttggcatcttgctgctccctgtataagggcaaagctaaccttttttttttcttttcattgagacagtctctctctgtcacccaggctggagtgcagtggtgcgatctaggctcactgcagcctctgcctcctgggttcaagtgattctcctgcctcagcctcccgagtagctgggattacaggcttgaaccaccatgccaggctaatttttgtattttagtagagatggggtttcatcatgttggccaggctagtctggaactcctgacctcaaggaatctgcctgcctcggccttccaaagtgctggcattactggcatgaaacaccaccccacctccaaccttcaaaagatttaaaaaaatgtgaaaactgaaatgaagactagatactaatgaaacattggactcattatgactttgttaagtcattttgattttattaaaatcaaacattaataaagcagactgtgaataaataaattatattctttggccatttcttcattagacaaggatgctatctttcatggctgtgttattgtggggatggctgatagctcatagaaccaatctaacatccacagatttttttcatagttctggactaggtttcttagcataatgcgttgttgtggtcctcatggtctgttgttctctcttgccaaccttgtttcatcagtcccctgttgtcctgcagatttttgaagcattggaatcctagcaacagatttctcatttaagtaggatggtcctgatcactagtctcccacagagagttggtaaaaagttttgttcttcttatcacccacagaacttccctgaaacattttttgttgtgcttgctcagaaaccataagcttagtagaaaaatgcaccttgcttgtgaatacacaatcaggtgtccaaatgagatggtcccctcctagaagataatatttcggaagtcttgcctcagtgggaggtacttggttgtttgtttttgttttttttttcatttcaatagctttaggggtacaagtggcttttggttacatgcatgaattgtatagtgctgaagtctgggattttagtttacccatcactcgagtagtgtactctgtacccagggtccttggattttatgggcttgtttttgtttgcttttatgttaagatatgaataatatgatatgctttggctctgtgtccccactcaagtcttatctcgaattgtaatccccataatctccacacgtcaagggaggtacctggtgggaggtgattggatcatggggggcaattcccccatgctgttgtcataatagtgagtgagttatcatgacgtctgatgtttttataagtgtttgaccattccaccttcacacgctgtcactctcacctgccgccatgtaagacatgcctcttccccttctgccataattgtaagtttcctgaggccaccccagccatgtggaactgttgagtcaattaaacctctttcctttataaattacccagtctcgggtatttctttatagcagtgtgaaaacagactagcatataatagaaggctctttacctttttaaacttggaaggccaaattaatactgtcctttccattataagaatcttcagattaaatattttctcattcattgtccctcagatcatatacatttgctttttaactctaagttacatgtaataaacaatgaaattgtattgtggatcataaacttgagttttaaaaagatttttctcctaattttaaaagtaataaaaacaataaatacttactgtattccaggtagtgtttttttttttttttgagatggagtttcactctgtagcccaagctgtagtgtggtggcgtgatcttggctcactgcaacctccacttcccggcctcaagcaattctcctgcctcagcctccttggtagctgggactacaggcacaagccaccaagcctggctaattgttttgtactttagtctctactaaacagggtttccccatgttgcccagggtggtctcgaactcctgagctcaggtgatccacccaccttggcctcctaaagtgctggtattacaggcgtgagccaccgcgcctggcccaggtagtgttctaaggggcatgcttccattaattcatggaattcacaataaccctttgttgcagtaactattattatccccactttacagataggaaagcggtacagtgactggggcagagagaggctctgtgactttgtgcaagcagcaatgtaggcatttgaatttcggcacgctggctcctgagtccattctactaaaaattgtgctgtatttaatgcagagaatttcaaaaacatgagataaaaaataagagaagaatagcatcaattttcccatcattcaaaggtatctgttaaaaggaaacatttaaaacttagctatatatactttctgaatttgtatgtacatataaacttataaaaaatgaaaatgctaattgttttcacacgtactgtttggtagcctccctttggtatgttcccagaccaaaaattattattcttccccatgctttttttcagctacataatgttctattttatggaagtacatcatttccataattgaatttcttattaagacatattatttgcaaatctgcaacaaatgtgcatgttatttttagacgtatgtttggttatttctttacgatagagtcctagaatcaccggctgaggcaagggagatgcacatttgaagcctctttattcatcttgccaattgtcctcaagaaacattgtttcaagtcccattaatgcaagcaatgaacaaaagtttttatttttctggatactggatgcctctggcttatttttctttctattctgtttctttaatagacaaaacaaaagaaaaagtttctcatatcaatgtgcatttttttgcgatttgcaaaaagttcaaaaattaacaaaatttatctattccttgagtaaatgtatgtggttcaagatgtcaaagaaacaaagtattgtgcagtggaaaatgagtgcaccttcagcacctgcctcccagacatccatcagtaaccctctcaggaggcgaccactgttaccatttccttgactagccttcctagaataattatgcatatacaagcaaagaagggtataagggtacacacacaaataagcatactacatatattgtttttgcccttgtgtttttcacctaacaatatattttggaaattattccatattaataatcaaataatgatattattatttttgatgcctacctactattgcattataagggaattataagggaagggttgcaaatattaacatctgttaattagctttggatatttcttcttttgcaaatacttgccagtgttctttgagcagtcttagaattgtggttttaatgttttgttattgatgatgatttgtaagtctttgctgtgaaataagatgaccgaccattggtattaaatgatgtaaattttatttcacatttcattgttgtcttttcaattttgttttctggtggtaggcttattttgttgttgtttgttttgttttggtgtggctatggaagtctttttgggcaatcaaatctatcaatcattttgatttgatttgtgaatgattttcctggattttcctggatgatcagaggctagtgttgtctctttgtttacttagattcttttgacaagggctttggctattgtgaatagtgctagtatgaacatggatgtgcaaatatctcttcgagaccctgctttcaattattttgggtatatgtccagaagtggaattgttggatcatatggtagttctatttttaaatttctcggaaactgccatactctttctcataacagctgcaccatttcacaatcccaccaacagtgcacaaggattccaatttctccacaccctcaccaatgctcgctattttttgggtgttatttttgacagtagcccatcctaataggcatgaggatcaattgttctgaacataacatttctgtcagggtttttaaaaagtttccaaaatgacatccctccagctccacatattctataagagcaatatcataaattagaagctgtctatgaaaacttgtagttggaagatgtttgttttctgtgggttagttacatttcacatatgcctcatttgtgaaataatttctaatgtgcatgagctggaattcaatgcctgtagtcaaagtaggcttaattttgaattggagttgattaaaatgaaatgactaattagctttatattgacttgggagttgtcccctaaggaaggcattgggacaatgttgatactctgattacctctattcctacctctgttagcttaaaatattagtactgcattcagcacccagcaagaatttctagtatctgaaggcagcaggatacttgcagccattttcaaaccatggaatatggatgattggtagagacttctctatcttgagtcccttctaatatttcatgctttatcttattcataagaaggggcttcactaagtaggactgtcttgtcttgaccactaggggatcaaggttaagtttcttagtcttggtaattgtcagatttctagtctttaaaatagggataatgtcatggagtacctatgtcagagttgcaaggaccaaacgagctaaggcatgaaaagcatttagcaaggtccctggcaagtaagggctaaataaacatggtgtttcttgatgttatgtcttgtaaccattgtaataatctcagtcaatcagatttatatcagggtacaggttcttttctggggaatttttctagcaccaggtattttctgtttatcttctatgtggatggcttttccttatttcttctcattgacaccaagggattccaagtcccattctgattgtgtattgtcaaagtgaaaaacagctgtggccagcagagccatgactataaccattttcaaagtcctgtgtgtaacaaacctcaaggattgatttttcactaagcctttctccttgactgtcaaatgacaagcaagggtatgcagatgataaccccgaacccctttgatcccatttccaaaatatggccatgccatagatgaaggcaaattgttttatttcatcttgttggccccattgtgtatgctctaagttcattttggacttctgtctttactgatagcaatttctatttctttcagacagaagccccttctttcataccttttagttgcatttcttagcattctggccgcagtcttctactacatggtccttatttgtcatctcttccctttcttcctctctccatcccttttttccattattcatccagcaatatttattgagaaccaaccatgtgaggggcagcacactggacattgtcttggcttcctctgtcactgcagatttaatggatcactttagacttatgcctgtattattgccagggttcccctatgtatattgaaacaaatagtctctggggatctttccattttctgccactgattttttctttcttttctttttttttgagatagagtcttactagctctgtcacccagcctggagtgcagtggtgcgacctctgctcactgcaacctatgcttcctgggttcaagtgattcttttgcctcagcctcctgagtagctgggattacaggagcgcaccaccatgcctggctaattttttttttttttttttttttgtatttttagtatatacaggtttttctcatggtggccaggctggtctcaaactcctgacctcaagtgatctacctgcctcggcctcccaaagtgctgggattacaggcgtgagccaccacacctggccattttctgtctcttctgattgggctgtgtatctgagctgtgtcctgggccactgtgccatcccacagctgacaaaatggctctcacctccaggaaactcttacctcagcattttttcctctgtcttgagcttttcttttgttctctgggaatagtcctcttactttcttggagcttctttagttattttttgatcaattttttttacacagttttttgtaacggagcaaaatattttcagaacttgtttctggcatgtgtgtgtctgtctcatctatctgcctgtgtctatgttaaccgttctttgaatctgatgcccaatattctatttgattctgttgattctgaaaatttctttttagtcattggtttagcatttctacctcttctccttaaaccctaggattttctttaaaaagtgttgggactgatgttctgttcttcagattggcgaacatggctcaaagaccactagtgtttaagcagcagcagcttttctatattctgcttgctgtgggcacttgtgatgtcccactgtggctgccatcagcagagatgtggatcctggtggtggctgtgtctgcctcctggccagccagcttcctttatagggaagaaatgcttccgcttcttactggggtgtgagaggcgggcccgtcagtcactgctgctccctagcactcatagcaatgtccattttctatcctttgtgccctgatgataatctttctggtatcataactgtcttctcctccccttccctgtctcctcttcctgctttttttcttcttcctccttctcctcctcactccagtatcaaggcttagcttaaatgtgttgcactataaaggcctcatattttaaaaatataattcattcagtcctcctctatgcctaagcttatttctttgttatggcacttttcatttcatagtatagctctctaccgaggagcgcatacgggataagggcagagtatgagtattttttgagcccaaaaaataatagtcatttttattggtatagcttcaagcatagttcatttacatgatttatgttttaggaaatttcaagtgcagaaaaattgcccagcagttagagatgattgggttatcaatatgctccctgttttttggtgtattttttccagctttattgaggtataacttacaaataacattgtatatgtttaagatgtacaacttgattttttcaaaattaattatttttttgaagtaaattttattgtgtatacttaaggtgtacaacatgacgtgatgagatatatatagataataaaatgattactacagtgaggcaaactaacgtatccatcatctcacgttgttatccaacactaaaatctacgcatggagcaaaaatgcggaatacagtacaatatgattaactatagttctcatgttgtagattaaatctctagacttgttcatcctatatctgctactttatagcctttgatctacatcttctcattttcttcccttcccccaaccctccccataaccactgtgttatgttctatttccgtatatttgacttaataaaagattccatatataaatgagatgatgcaatttttttctgagtctttgtttatttcacttagcacaataacctccaccaggctcatccatgttgtggcaaatggcaagatctcattcgtttttaaggctgaataatattccatttgtccatttgtccatgaattgtcacttaggttgtttccatatcttggctgctgtgaatagtgctgcaatgaacacgggggtgcagatatctttacgaggtggtgatttcattcctttggatatatattcagaagagggttttctggatcacagagtaattctattcttaattttttgagaaaatttcatactgttttccgtaatggctgcagcaatctacactgccaccaacagggtacagggttcccttttctccacacgctcaccaacacttgctatttcttgtctttttggtaatagaagggcagggcatcattaatattgtttcccttacatgtgctgaacaaacacagcagagcagttaccagcgctaactctggaactggcttgctcatgctcatctcttgtccctgccagttcctaactgcggaaacttgggcaagttgcttaacctctctgtgccttcctttgttacttggagctgataaaaataatgcttagaacagttactgccatataaaaagtgctattaagtgtttgctattatgtgttgaattcagcttaatagaatcatcatcaggatcaccagcaatttattgagtgacagtgtgtgttttattcattgatcgtcattacacttagaatagggtcggggatatagcaggcattcaatcaatatttttgagggaatgaattaatgaatgggctagatgttatatatacaaagaaatatgtctaatttctttccttcaggtctcacagatggttgagaatacaagatggagataagacgaaaattgaatggtgcttaatatgaagcccttcaaggctgcctctttcagaatcatttaggaggcttattaaaattgcagatttgctagccaaactctcctcgatctcagttccatagatctggacgtcggtccaaaactctacagtgccaagaaagctccccaggggcttccggtgaattcccaagaacagccaggactgggatcgcaggccaggcagtaaatgatacaggagatgagaggagggagagctctgggggctgacactgttgggaaggcctggtgggaggggaggtacctgcaagggcatgtagggcttgggcatggggtggacttgatcgtgggggcttagactgcagtagagacattctggtcacatttgcctgcccatgagctccttccgtctcctgatgtgcctcagcaatttcatgtgcaaagtacacaagagccatttgttggaaagtacctaaatcactctatttactgagtgctttacttgcacttataaatctaaaacaaattttcaagcaaataaacaagtgtgtggatatggagcagaaataccactcatggcatcctgaacttggccctctgactcagtaattagtatcctaaaactgagttcaagcatcacattttattttcaggttttacatacttcatagaacttggtctctgatgttacagagatcacagtaacagtttaccttatctccagaatttctaacttctcaatggtggcatctctcattagaacaggtagtcaccaaatagttccacacaaagactctcccaatgtgtcatttattaaaacaaacaaacagatttgatatacaattaatataccacaaaatcacccatctaaaatgtacagtctggtagtttttaacatattcagaattctgcagctttcaccacgaattaatcgtagagtattttcatcaccccagagccacccctccctacctttagtcacttcccatttccccggcccctgataatcactcatctgctttctgtctctgtggagtactattctggaaatttcatataaatggaatgatacaacatgtggccttttgtgactgacttcttttacttagcatactgttttcgaggttcatctatattgcagcatgtgtcagcacctcatttctttttgtgctgaacactattctactatataaatatacttcattttctttatccactcattagcttgtacacaactggatttccactttttggctatgtgcaaagtttctgtatgcatgcatgttctcatttctcttgggtacccacttaggactggaattcctgggacatgtgctaactgtatttatctaactttttgagaaatcttcaaaatggttcccaaagcagctgcactattttatatgcctaccagcaatgcatgagggttcaatttctccacatcctcaccgacatttgttattgtctttgattatagccatcccagtgtgtgtgaagtagtatcttgttatagttttgatttgcatttccctaatgataaatgacataaagcatcttttcaggcatattggccatttgcatatcttccttgagaaaatgtatgttcaatttttttccatttaaaaatttgatgattttaaattttattgttgagttgtaaggattcgttatatattctggatagtagacccttatcaaatatatgatttgtaaatattttctcccattttgtgaatcttttcactttcttgatagtgtccttggatgcacaaaagtttttagttgtgttgaaaaacagtttgtatatcttttcctttggttacttgtgctttatgtgcatatctaagaaactgtttctaatcctgggtcaggagacttacaactctgttttcctctaagagttttatagtttcagctcttatatttaggtctgattcatttagaattaatgacttgtatatggtgtgaggtagaggttcaaatctattcttctgcatgtggctatccagttgtccgagcactaaatgtttagtccattttcatccttccattttgtcttgtccaggctgttgaagtagcctcctcacagctctccctgctcttagctcttctccaccagagtccatctcccaccatactaccagttattcatcttatacacagatatgattatgtcctttccttaataaaaaaactttattctttccttagtttctataaaatagttcaaatattcaacataaaattccaggtcctatctagcatgacctcaacccacctcctaattttactgtgttccttctccccacttgctaccccatcccagccatccttgacttcttagctggtctctttctggcctgagtgagacatttggcctggatatatatgcatggtatggctttggttgcttactgtggcattggtgcttatgggatagccattgactttaattaatggggtgttatcagcacatttatcctattgaaatgactagaggaacccataagaaaccacattttcaggactagtaatctattttagcatcatttggaagacaacaaactttcattttatgggtagactaacattcacaaattatgacatatatcatataatcataatcattaagttatattttaaataatcaaccatccaccatcccaaactctaagactttgttggtaagttttgtatgtcacaggttcatatttttcacattctgacacctacattcaaggcctcaaactttaccagagactttttatcattgaggtaaaactagaagtcattaatttaaaaaattatattatttttaattatggtaaaaacataaaatatacattttaccatcttgattttttaaagcagtttactagtgttaagtatattcaacagatctccagagcttttcatcttgtaaaactgaaactgtaacccatttaccaacaactccttccccatttccttctcctcccaaggcctggcaaccaccattattctttctgtttctgtgaattttactactttagatacctcatataaatggagtcatatggtatttagcacaaggtcctcaaggttcatccatgttgcagcacatgacagggttttcttccttttcagggctgaataatactccattttgtctctatatcacatttttttgtttatccattgatctgttggtagacatttgtgttgcttccacttcttggctgttgtaaataatgctgctgtgaacacaggtgtgcaaatctctttgaggactctgctttcagttctttgggatatatacacagaagtgtatataggattaggattgcaggatcagatgataattattgttttaatttttcaacttatcttctcgaatgagaacactaaattaaatttgtggggtttgtgtcattttagacatagctcacgaagaagatggtaactttaaattgtccctgcaacaatgatgatgggcttcagtgattgtcttaaatgagtcatcattatttttgtgttttataaccaaccctatgcatctgaacacaaaagtcaaacctttttaatacctcaggtgtattttacaccaaaatacagggaaaaggcatcaatcaaagctgcttaacagctgatatgatagtgattacatgtgatatggtagttgagactgaaatgctatttgtaatacaaagattatcttaactgagtctgatttgaggtgaaaaaaggtactaattagggtgacaatatgaatttgatttaactttaaagtattatgagagaaaacatactatgtcacaactcttttatataacgaactgggatttaggtatggagtgggtagaatagtggtcaagagcagggattctggagtcaagtgtttggcaccaatcctggctctggccattgccagctgcatgagtgccactgggcaagcttctcacagcaccagatttttcatctgtaaaatacggttaataatggattgtggtggcattacatgaattaatatacgcaacatgccggaatgacatctggcagggaggaaaagccatataagattttgtaattgattttctagcacaagctatccattcttaggttgttgtatcttccttgtgtcatcccacatatcaatattgtcatctgcaaaaaatatacacgtatgtctcttttaactaatgattttaaaatgtggactaatcaatgatctaaaatcccccttccttttagtcaattagtagttcataaattgaagatgtgatggatagaacatttcgtacccagaaagctcttagattgtgaatgctgagggaacactgggagattcagtgagtgcagcacaaatacaatctaggtgactggaatagtttctaatgaatgaatcactgaataagcagatgggttgtggaaggcaaaccatgagtaaattttttcttttactacagaaatatttctgaaaggtaaatacccaggtttatgatgatagaccttctttaaactcatgctatttttctttctgggttttgttgtcaacacaatctcatctgctctttgcaaccattacctctcagaatgggtatgaagatcaggtgcaaccatgtatgtgataatgcttctaaaaactattttttttccagttttattgaaatatattttgcataaaaatataaaatccacccatttaaagtacaaagctcagtggttttcagtacattcacagagttgtgcgatcattgccacaattaattcctttctgtctccatggaatctaattttgaacattttatataaatagaacaatacaatatgcggtcttttgcgtctggcttatttcatttagtatagtgttttcaagggtcatttatattgcagcatgtatcagtacttcattctttttattgccaaataagacttcattgtatggatatgtactacattttattttctcattcatgagttgatgaacatttgggtttccacttttggctattacaaataaaattgctatgaacgtttgtgtgtgagtttttgtgtggacacacatctttaattctcttgagtatatgcctaatagagaaatttctgagtcatatggtaaccctatatttagcacttccaggaactgccaaatggctgtacgattttacattccaaccagcaatgtgtgagggctccaatttccctacactgtcatgtacacttgctattatctgttttgtcataatgggtatgaagtggtaaaactactgaaaaaagtgacatattcatggagtaaaagtaaaattgaaacatgcagaaagtattcttcaggcccagacagccccccagaattacagttttttttctagagtccttgaaagttgtctatgcacatatgacgtatccctagatatgtatttgcaagaacacatgtaggagtatactattttgtatcattctttatcacttaataatatacctaagagcaattgctatagaacaggttgacctgcctcattctttttactcttagcagagtattttttgtgacgatgtaccttcgttcgttttaacagcttttctaatgaagggcattttggttggttttgctcttataagtaatgccatgcgcatccacaagacatacaattgttcttgagtacatttgtgaagatattcacaggaaaaaacaagttatactgctatataccaccatcaacaggggatgagagtgcctattagcccacaatctttccagcttaacactgtgtgttatcagcctttcccatcttggccaatgtggtaggtaaaaaatagttcagtaaaagttgatttgacctataaggggcaaatcaagtttatgttataaagcttgaagttcaacattgaagttgaactccagataatatggttaaagctttcaaatttctgagaaatatgcaggcatagagattgtatctaaatttgccttaatacatagtatatccatttgctaattgaagaaggtgattggttcatttatttattcaactggcatttattcagcatttatcgtatgctaggtgaactttaagtgctagagagaaggatgaataagaaacatacattgcttacaagtaatatatagtctaataagggggacatatatatataaatcaataagcataatggacatgaaatagaggcaagtattatacaataagctgtgtatattaggccataggctaagctactgtgaaaaaaaaggaccctcaaatacttgggaaattgcttttgggaaaagacaaaaaaaaaaaaaaaagcttgtggaaaagggtgaaaagtggacatgagagtaaggagagtaagccatttttaaaataaaattttattttaacttcgattgtcatatggtaagtgtacatattcatgggataaaaatgaaaggttttgacacatgtgtgcattgtgtaatgatgaaatcagagtaattagcaaatccatcatctcaaacatttatcatttctttgtggtaaagcattcaaaatcctctcttctagttagtttgaaatatacgatgcattattgttagccacagtcaccctgctgtgcaatggaacaccagaactgattcctctcacctaactgcaactttgtaccagttgatcaacctctccccatagccatttcctcttaagcaagaaacatggaaattgtacacattacttctgaaaatacactggcaagccacttctagttgcagggtagacttggaaaatgaagtctaactgggtgaccctgtgcctccacattattctggaggaaggggatcacggagctagggtccccagtctgggaggctggtagagaggcagctcgctgtgctactctgatatttttagctccgtgggggaaaaagaactgctagacagagctctgtcaacacagatctgacaatctcattcagaaacaagttacagagacctcaagtgattaataaacaagattattctatagaacatcttatggtgacataatcaatatgatttcaacactcagctaataaatgctatgaaatacaatttatgtaaggtgttaattgacatgtcaggttttaaatacaaaaggaatgagggagggagacatgaatatagatgggtgttatcagagaatgacacttagatacatttcatattgtgtcatgtaaactaatacctactttttgggatatttcttcatggtttagtttttaatgtagattcaagagttttatatattcaaactcttcatgaaaaaaattcagctctggttatgtacatccacatttacaggaattgaatttttctttttgtacacttgtgagtatattttttcctatggcaaacgttttccagaaagcaaaagttatttgtgttactgtccctgataatcgatgctgtgtaataaatcgttctcagcaatggcagtttggacactgatggacagttggtgactggtaatttgtacagtatgtttagtgggacggcgggcaagggggaaaagtggcatttggttcctcagtcccagatttgggtcaatgttctcataatactggtgagcaaggagcctaattctttaggaattttaaaaggtttcttttagtgaagaacatttcccaggtgtctaatgaaaaattataaatgaccaggtataattttgccaagctttccaacatagttttcctttagggtgagaaacaatcctttgattttcttgaagtagaagtctcttctcgaatgctaacagtaaaacaagaccttttcagacagattttgtattttgccatcaaatgtgcaatttttgaagatacgggacttgagaatcaggtaaacttcgttctgaaaaccaggcttaattttatgactgtgattagaaagttgaaaaaaaaatcacgttctcacaaatgaaaacaaaagtcagagttcaaactgtttatcctgtttctgtaagcttttgtttcagaaggccaaggattatttgaggagaacctggaaaattaactcaaatggaggaaaaaaatggcgtttatgcaaaatgcagcaaaagcagacagccttggagaactgaagcttaaatagcgtaagagtctgagtactagtcttcagatacttaaaacagcatttgatagacaagttagatatttaaggaaacatttaatcagcttggcatcagcattagtggcttcaatttttggctgagcctgactttgccatatgatcctagacaaatttgcctaaaatgggtgatattaacttctttagggaaaggctctgtactgggatttttttgaggcctatgatttatggggtcaagctataaaacaggaggaaacacatgctcatttgtataatttttacatatatttggtccataattgtacagctaggcaattcatttattatctgtttgagagtaaaagtttgattattttaatgttactacttctggttttttctcttctcacatgttcccagtgactcctttctgataacccaacttatcatcatagaacgcatgtaatgctgagaataagacacagggtcttggaaaatgaatgacagcaatggtgctccgatggcagttttgtcagactttgaatggtttatgaaatcactgttgataaaagtgaacaccttctactgaagggagaaatttaggggggaaaaatcccaaatagaaggagttaatatccaaacctggagacttacctggtaaggttcacttaactggtaaaatgtgatccaatttaaacaaagtatttttagttttctcagaacaaacatcctacataaacacaaaaaatgatatgagacatagatataacttggttcacaatattttccaaaactataatgtaccagccagttggtacagcacaccaggagagaagatcattattaatgtgctaatagcagcattttattttgaaacccactctgcatggttacagggctcaaaacaacatattctaacaggaagatacattaccgaaatattttaatgagaatatttaatatgcattgagaggtccgcattttcttgcagagaccttgtaggtagctctttgagatttctgtctctatgcatttaagtgaaggagttggttgggtattttagttggcaaattttgcagacatgtagctttggtagtggagaggtaatagtaccatgccctgcgtgctggcgaggaagccccacagcaacagtggcttttagcagctaccagatttgctaaaagcagccatgtccaattagcagtaagtgccatgcacctgcagttactaggaattgaacctcttttgaggctgaatcttaatgtagccttttaaaaaaatagcaaaaatcttactcatactctgagataataaagaaaaattagcaatggcaaaatggacgcactctgaaatgtattcttaataatgatttagaatatggggtaaatgtagaggcaatgacacatttaaactgcattatttttaaatactgttttatcagtttacttcctaattttgaattcaattttcatatctatactgcaactgctttttttttttttttttagaaatctataatattgctgcaggctccctatgtatgtttccataattttctgcaaagtgttttcaccagaataaaaaaaaattacagttcaaaattgcaaaactgtagaaaaaatatgctctttgacttcttttctatgtgtcaaattcaccacaatggaaaggactacactatagaattaaaacgttattttcaacagatagtacttattttaacatgtgttcagcatttaaaaatatttaatattcttttctaaaaatgcttacattcagaaactatttatgagggttctgagcagtatgatgtttctttctctgatttactgctttttctcttttagaggatattgtaggagaaaaacatttgttaagcaatttccagaactactaggttctaataagaccaataggctaataattcatttcattgcaactggagtgtgtacttttcctttattctcagtcataattttttaaaagagccaagaacaccaaatcatcaaatctaatgttgaacatgtagtaacttttatttgctgatcatactctgagattcaccataacgaataaatcataagtattaaaatttcagctttttaacatacccactacactgctagcctggtaacacagtcaccaactacacagcttcttcaactgttgacgtgctttaaagctaggattatggtatcctgccaaaaagatcctacaaactgtcactattttggtttgtcctgccagccattgagaagtagacaatttctatatacacaaaccagtttggaaaatttatgcaaataggaagttattctcaaaatgggttatttgattgcattttttttttttttttttgagacaaggtctgactctcgcccaggctggagtgcagtggcgtgatcttggctcactgcaacctccacctccgtggttcaagcgattctcctgcctcaatctcctgagtagctgggaatacaggtgcatgccaccactcctggctaatttttgtatttttagtagaggcaaggtttcaccgtgttgactagggtggtctcaaactcctggcctcaagtgatccacccacgttggcctcccaaagtgctgggattacaggcataagccaccgtgcccagcctgattgtgttttaatgtattggctcccaaccagtagcaacagtttgggtgcacagatattgccgtagtgtttctattcaatgtgtcaaattatttaggtaaaagtttggcttaactttgttgacatggaatttctatatcctccagtttctggtttaactggtttatgtggaaatgaatggaaacacatggttaagttccccagcctccagcttctctcttcctcttacctatatttgtacttgcccacttttcctcttgtgggcctgttcctagaatccattatgttctgtgggtgacatcagcctgctactgcgggaagaaatagaattttatggtgcccaagataaaatcgactatgatgatgcagaatgaagacctggagaggagtcagagattgcaggggataaaaagagagaaatcagagatgctcccacaaacagagaaaaccttcagaagcagcaggaaggacagagtaaatggagaacaaaaactcaagtcaaaatagtcaatggaaataaacagttttgaattccagttataatttggaaaagaagcaaacgtttattttaaattaagaaaaaagtcgcttataatttcctgaagtttagaaaagtgaaaaatagttaaacctcctgttgttagctaagaagtgtctattattataagtttgttgctggagagaacataaaaatctctatctattgctattttttttttttttgcataagggatggataaaagagtgtttattttatttagcctttggcctgtaaagtaagatttatgaaacaaaggacaatcggaaatgataagaattttttcctaatttctaattatttagctaaaccttgattgatttctctcaggctagtgcccatattacagcagcagtcagccttcatttatcttacctgggaccactgctaaatccgatgtcacttttcagtttttatattatgtgaccatttagccacatttcacctacttgatcattccctccatcttgagacctccctcgacccggcttccaacatactttgccctcctggtttttctttctctgttggctcactttctcagtctcctctgctggttgctccatttttccacaatctctcaaaactggtgctcctcagattaagtccttggacttctctccttagattgacatctggagtcatggcttcaaacaccacctatcactccctttctccttgaactctagacgtgtccatccaactgctacgtgacatctccactgggatttctaagaactttgccaaacttaacatgtctaaaaccaaattctgggctgggggtggtggctcacgcctgtaatcccagcactttaggaggctgaggtgggcagactacttgagcccaggagttcgagaccagtctggccaatagagaaaagctgtctctacaaaaaatacaacacttagctggacgtgatggtgcatgcctgtagtcccagttactggggaggctgaggcgggaggattgcttgagcctgagaagttgattctgcagtaagctatgattacaccactacattccagcctgggtgacagagtgagaccctgcctcaaaaaaaaaaaacaaaaaccaaaaccaaaaccaaaaaaaaaaagcaaagagcaaaacacaaaaaacatattccaaatctcccctttaaacctcctcttcttacaatgagtcctatcttgatttatggcagatccttccttccagttctcaagccaaacaccatggggtcattcttgactcctctcttccatgggctcatctaaacatcagagtatcctgttggctatctggaatttaaccacttcctatcactgccattgctacccacctgctcttagttatcaccagagttccctggagtgttggagccgccgcagagctggtttccctgctcctgcctttcctgcccatgctctgtcctgccagtcagctctgtcctttaaaaatggaaatcaggttacctcatgactcttttctttctttttcttttctttttttttttacagaatcttgctctgtcatccagcctggagagcagtggcatgatctctactcactgcaacttccgcctcccagattcaagtgattctcctgtctcagcctcttaagtagctgggattataggtgccagccaccatgcccagctactttttgtatttttagtagcgaaggggtttcgccatgttggccaggctggtcttgaactcctgacctcaggtgatctgcccgcttcagcctcccgaagtgctgggattacaggtgtgagccaccgcgcccagccatgactcttttcaaaaactccccatcttctccacttccattcagtaacagtcagatctgcatggccccctcctgaccttctgatgtcatgttctttgctaccccttgagtgcattgaacatgcctctgacccagaacttttctgtttgctatttcctcaagtgcatatcttgttccttcattttcttcaggtgattattaaaatttcacttccatgagtccttccctggcccccatatttaacactgcatcttcctccatcttctttccctcctccccatgtacattttactcccttactaaattttttttcctatctcactttcttttctttttgagacagagtattactctgtcacttaggctggagcgcagtggcgcaatcttggctcactgcaacctccacctcctgggttcaagcaattctcctgcctcggcctcccgagtagctgggattagaggcgcgtgccaccatgcctggctaatttttgtatttttagtagagacagggtttcatcacgttggtcgggctggtctccaactcctgaccttggcttcccaaagtgctggtattactttctaacctcctgtgtatgctacctatttatttgtctgtctctctacactagaatataagctctatgagggtagacttctttgttttgtccaatgctctatttccaatatttataaccgtactggccggtaggtactgtcaattatagtttttgaataaattgagagtaacaaattctaactggtgaaaataaattaaatgggccgggcgtgatggctcacgcctgtaatcccagcactttgggaggccgaggcgggcagatcacttgaggtcaggagttcaagaccagcctgggcaacatggtgaaaccccgtctctattaaaaatacaaaaattagctgggtgtggtggtgcatgcctgtaatcccagctactcgggaggctgaggcacaagaatcgcttgaaccctggaggcgaaggttgcagtgagccggcattgagccactgcactccagcctgggcgacagagcgagactctgtctcaaaataaataaataaaataaaaattaaaaagaaaataaatgatctcacaggatatcatttcttgattggaggaggagagaaaaatgtgtatgtgtgagggtacagagagagttcctttgcattagtgagggttcacatcagaactgtctaacctccctactcagtgggtcctgttacctctctcctgaatccaataatactctggtgcacaccttttactggtactgaggctattttaacgttccattaaaaaaaaaaagaaaacatttaaaatacaaaaacaaggctgtactactttaactctgaccttagaagactctcagttttataactgtttagagaaaatgtggaaatgtttgctggccccaatctttttattactcatctctataaagaggcttttaaggacatattaaaaagtttccatctctcttgtctcttgcctttcttctcatcttcctttcttgtaccccaaatggctgaaagcaagaccctgagagtctggaagaaatatattctggtcagagcagactgagctggagctggcctagaaccttggatcctgacctcagaattgctgctcaaattactgctctctgaaagagtgagctcatgcatgtttattattactgtgaacaaatttagctgttgtttcacccaaacattgaagttctcgcttggacccctttgcttgtttgtgcttttgcaaatgtgttttctcatgtgctactagaaccaagatgaaagcttcagttctcagaacaggtgccacgaccgaggagacaaaacaagagctatagaggggtgtggtgtgtgaaactgagaaagcaggtagtttttcagaaaaactgagagccaggaatgacttcatccatttcctgtaataaggcaatggtctgaccttgaggaacctattagagtgtgcttctaaacagaggccatttcgaggctgaatgtacgggagtatttacctttgactgttttctgaagcaaggtattttataaactgtaaagtggcttatacaattttaggaatggaaagttttgcaaagtctccaaaatccctgggagttttgaatgtgcaggccatatgaattctttgtagtttcatggtcttgctgttcagcattctttagagtcacctgcatggtagaagtttagtaggaatttgggtagttatgggctggtttctttgttttcccaaatagaggtagcaaaatggatgctaagaagcaaattacttttactattttagatgcctctggggacatcctgtcataatgcaacttaaaatatactcgtctcctcagttcctttttatgtatttatttaatagtcttcaaccaatttgttcttcattagctgttctacaatacttcaagagaagtcatgataatgatgcatttaggatcagaaaaatatagcatgtgtgagttcctggggactttagagaatatctagcccagtctttcattttatagaagaggaaggccagggatggtggctcatgcctgtaatcccagcactttgggaggccaaagtgggcggatcacctgaggtcaggagttcgagaccagcctggccaacatggtgaaaccgcatctctactaaaactacaaaaattaggcaggcctggtggtgggtgcctgtaatcccagctactcaggaggctgaggcaggagaattgcttgaaccaggcagaggttgcagtgagccaatatcatgccactgcactccagcctgggcaacagagtgagactctgtctcaaattaaaaaaaaaaaaaaaagaagaaggagaggaagctgggggtgaggacaggcagtgactcacccagggtctcacactgatttgctggcagagttaagcatgaaaaggtgcctctcctagtctctttccagtgttcttgtcatcacaatgagttaaaataaaaattactagcaacttgggagtaataacaataaacttctcaaaatctactacatggtctagaaaaccaaacataaggccggacgcagtggctcacgcctgtaatcccagcactttgggaggccaaggcaggcggatcaggaggtcaagagatcaagacaatcctggccaacatggtgacactctgtctctactaaaaccacagaaattagctgggtgtggtggtgcgtgcctgtagtcccagctactcaagaggctgaggcaggagaattgcttgaacacgggaggcagaggttgcagtgagccgagatcatgccactgcactccagcatggcgactggactctgtctcaaaaaaaaaaaaaaaaaaaaagaaaaccaaacataaaaccagaatattcctgtgagttccattacataggacaatatggtcctgctgatctattaaaattatgtttataaattagaggctcttcattgggagatatacttaatgctagatgacgagttagtgggtgcagcgcaccagcatggcacatgtatacatatgtaactaacctgcacattgtgcacatgtaccctaaaacttaaagtataataataataataataaaaaaagaataacaggaaaaataattagaggctctttactgtatttaaggtgttcaaataattgaagctagtttagtatctccttagccttccccagcatgccctgcagctttgacgctgcagaacaccagttggtggctgatatttagatgatggaaatcttggacacattttcatttttgataaaatgacatggcactatggttacattttacaaatatttttgcggatgtatatcaggtggcatacccaagaaggaacagaccttcctcaggggtccttcttaggaaagtacagctttgcttctctgatcatcagaattggatccttcaggtattaggttggtgcaaaagtaactgcggtttttgccattcaaagtaatggcacctgaaagggttggtaaaattcagaatattataaaatcagtaaaagcttaatcaaatttgcctaaatctatcctacagattagtctatgcatggtttattaaacaacctaactgaaacacacatgcatatgtgtgagtaagctgacatcagggatcaccttatcatggaaaatctagggaaggttggctcaatcttcaatttgtgaagaccaattcccctaccacgtccatatatacatattcccaggagacttgtttcttcagggctctctttggttctcagctcttcctttctgaattagtgggtcactttaacctcccttgggtcacagtcgtgttccacactgggtgggtccagaggtagaactcattgcctttctttgaatcccacacaagaccacccaacaaggcattgtagttggtggaaaactccattgaagaaagggtctatattgcaacaaacaagcatctagaaatagaatattaaatatccctcctcttaaaaatccattgtccaattcagacttcagcataatgtaatcttctgtcttcttttctctgtgtttccatcttgagagccatcctattatctgtgtcctttctttgttgtcttaggaagaatattttggcttatcctttgttttgttctctccttcccggacctattatggtaaatgtggaatttgcagataggcttatttgcgctccccagcctgctcccttaatgctctctggtaagacacttctttgagtcctccgaggcgagttgctgccccccagcacctgctcttccccatcgcaacccatgacagtaaacgcactgcacatacttatcccacagactgctgtgagaactagatggaggctatgtgtgaagctgcaagctcttggtaaagtgctacagaaattggtagacactgttactatgataagatgttcagaaaataatggatcgattaaagtttcacttatctattaaaagataaaaaactctatgattgagacctttttggaatattggaaaatatttttgtgtgcttattagcatactgatatgtttcagtacacatttcatggatttatggctaaggatgttactttcaagaaggtaactatacatcgctctctactagcatgctgttctgttcctgagaaatagtggctgggcgaagggtatgcaaacatttcttaatatctcatccaataccattttcccactactaattattcaacacatggaaatgtaggtcaaagcattaaaaaaaaaaactagaacagcaataccttggtggttggcaggtgtttatttaaaatatttacgttttagccttattttttaatacttctttttcatatatattagatatttaactaaagaaaataataatcattctcatggaatactttaaaatagtagaaacaatcatgaatagaaatgaagatttaggcctatactaccctaggctctgtcattcttattcctaaccatttgcataggaaatttagattcacccacttctctttcttagaataagattcacaggtttttgggcatattcccattgcatgcctgactggggaggtgttcaaatccctgcttttctactcctcagccctgtgaccctgagcaatttctgtggcttggtttcctcatctgtaaaataggatattaatagaacatatccctttaacgttgcagtgatcacattaattagttgatgcaaaacagtccatctagaacagtaagccctcaataaatgctagctatcattatcatttcatagccagccccaccatggatgggtcatgtgacctgaagcaaatttaaattctctggatttcagttatctctcattgaaggaattaggctccatcagtggttctcaaactcaagtgagtatcagaatcacagggagggtgtgttatgacactgaaggccgggccccaccctcagaatttcttattcagtagatccaggagggagtgcaataatttgtatttctaaaaagctcccaagtgaagttgatggctgatctggagacacaccttgaaattcttctgcttactctaaacaaaacgtgcttttttatcttgagtgcacatcagaaccctctggggaggttaaaagtcccagtgaaatcacaacctctgcagatggtaaccagatcttagtggcttttaaagttctccaggtgcttccattgagcagctaaggttgacaacacttctaacaccgctttcaggtgaaaaagaactatcattctaacttaaatgaaggagaaaatgaattcatcattctgacaccgttatctattctttcatgcatgggcttatcctatgagaaataaacatttactaaggtgtatgcatgtttttagaacatccattgggaagcatgttgtacagcttgtagtaaaacagcatggtgcatgctgaaactgttataggctttgcaagttattttttataaattagttttgctggtgtgctgtttgattattggagagtggtgtgaacatgtttctatgcatcccagggggttgctgtcacctttaaggggcctctttaaatcccagctctttcatttacaaattctatgaccttggatgagtttcttcacttttctgtgccacaagttctcagtaaaatggagataattatagaacttacttcatagagctttgagaatcatacaggtaaagttattttacgtaattagcactcaaaagtgaccattaataatctaacgttttaaaatatattaataggccagatgcagtggctcacacctgtaatttcagcactttgggaggctgaagtgggtggatcacttgaggtcaggggttcaaagccagcctggccaacatggcgaaactccgtccctactaaaactgtaaaaattagctgggcatagtggcgtgtgtctgtagtcccagctattcaggaggctgaggcaggaaaatcgcagtgagccgagatcacgccactgcactctagcctgggtgacagagtgggactccatctcaaaaacaaacaaacaaacaaaaattaatagtttaaatatttttaatatatttcaatatataaagatgtaatttttattttaaatatattaaaatagataagtttaaaatacataaagtaaatatataaaattaatatgttaaaatgtttactgaaagtttacatttttctctgtattgctaagagcaatttattgccttatatgttgtgtaatatctagaaaacacacctatgtaatttccaaattataaccaccttggctcctggacaagtaggactgtgtctgatttttttttttgcatccttgtcactacctgccactctgagatcacttgttgtctttccatatataatcacctctaggtacacttctttcattatttctacgcatcctctccactttgctgcattcttgtgtgcattcttttctcccacgttggaaagaaatatgcatattgagcgattccaacccccaaaggcaaaaattactagccagtgttgaaaatgaaagcaaggaattttttggttattgttgctgtaactttttgatgtgcgtacatatgtgcgtcttttttttccccctaggggtggaatggggtggtgttagtcagggattactgacaggacggtgttgcctactgtgttggagagactaagactggggaaagattctccaaggctgggaaatgcagacgtccagtcttggaaaacagtttgtcgttggtcgttatgtcagaagaggagtgtattcctggaagaaggcccacaaaatatacccagagcccaggtgcctttctaagacgaatcaacattcactcacaagttcagctaatatatgacagaaatacaagaatgaacaagactcctgacttaagcttacagctgatgggaaacttgggaactggacagagaattaaaatacaacgtggttaggtacaacttacctgcgccagaggagtgacggaaggccttggacggggagtgatgcctggaggatgacagggcgacaggtaagttagggggctgggaaggggaagggcggccctgtgggtaaagggaaggaggttaaagtcagcagggaaacaggcagttccctgttgctggagcaaagcgcgggggtgtggctctcctgtctctggctttgctgtcaacaggcgagattggcaagtagggcgaccaaccggcctggtttgctcgggaccggggtttcctggaaggtgggactttcaatgctaaaactgggacagtcctgggcaaacaaatcagtacggttggccaccctatctttgtgtgggcatctgctaactgagtcatgggcctgtctggtttatttatttattttttttctgcctgagtaacagaagaatgtgttaaacatatggagtatggaagaagaaggagaggggagataggatttttatgttatagattggaagaagacatccttgatgaaggagatgtttttactttggagaaggactgcctcagccgcgaaagaccaaggggtggcaccacagggagaagtctgcactgcgcttgtcaggacggccagtggggggctgctgagcgcagggagtcagtcctcgcaatgaagatatagtctcggggagataatgctggaaatcgatggaagaagtggaacaggacacaaatttagtggaatttctttacaatgtgtgcttcttgtcaccagttcgttaaccatgataaaaacggttatgttgttacattcatcaagatccaaattttctaccattttaagatgtctatcagtcacaatgatgatcactgaagaccgaacgagatcatttcctctaaaaattatgttacatttatccataatggcatcagtgtctgttacacgtttgctttaattttgaggtcaaatacgacatttgtaaatctagcacttcatgtgattctgtaagcactaaacagctaaacatatttacttcttttttttgaatcaattagaacagtgctgtacaatagaaaaatagaacagtgctgtacaatggaaacagtgctgtacaacagaaatctgtcagccacacgtgtcgtttaaacttttctagtaatcacattaaaattgtaaaaagaagccaataaaagtaattttaataatatattttgtttgacataatatagctaaatatcaattttgacatgttctaaatataacaattattaatgaaaaatattacattcttttggctttgtactaaacatttgaaatgtggtgtacgtttttcacttatagcacacgcaattcagatgctacatttttattaggaatatttaatctgtagatagatatcgtaaaatttacatttgaaaaaaatagattcagacacctaagttgttacaagcatacttaaaagttttcaatgactgaattgagtatcagttttaaaatttaaatcaatgaaattaattaaaatgaaatgaaaatttagaaactattcctcagtcacgctggctacatttcaagtgcttcatagccacatgaaagctgtattggacagcaaagaagtagaatatatttggaataaaaattttaaagtggacacattgtgttactctcgttagccatgctattgctattttttttcctatagctaattaaaaccttaagatccagtaggttctccacctttttttaaagcattagttccatgtcgaccctgtagatggcagcactttcttcctaaaactacatggaggagttgcctgggcttgtcactcagattctggcacttttcatagaaagagtctgaattatctggaaaattctttggtaacataggtcagaatcttttcagctctattgttattctgcacagatggctgttgcttatgaaaacaatctctcagcctctagtccaggatattactcattcctcagttcaagaaactctagggtgagaggagaaaggggttcaattacagaactgttatcaaaatgcgttggtttatgcacatccgtgttttggacatggtgattccaagagactcttaataaaacttttcaaagtagatgagagacagtttttccctcacatgctgtggcaatattaatctatgttttcatgttccactggactttgtaattgaattttaaggaatgcatacagggcttcatatttatatataaaatatccatatccagtgttgaaagaaattaacaataaaatatgtacctgtataaaatttgtgatttttgaagcacccctctcttcctcttcgcattgcatttgtggtaggagaacatgagacaaggaacgaggtactaaggacaaagaaggagcgattcagaggtggatttcctgaagaccaacaacatttttgcatagctcgtgaggactctctgatactaaactccaataaatgatggtttggtgttttgattgcttttgattgacatttaaaaattacaggagactgagataggaggattgcttgagcctgggaagcggaggttgcagtgagccaagattgcaccactgcactccaacctgggtgatcgagtgagaccccatttcaaaacaaacaaaaaaataaaaaataaaaaaaaacaaataaaaatcacacgcctctttttttcactcaatctgttttccaaataaaatatcaagattctatttgaattttaataatgattttgctgagttttatagcttgaatactatggcaagtataatgtctaaaatgctgtgattttgacttaagaaaaaatttacagttttcttaatatactctttagttcttttaaactctaatacatgaaatggattgctaatgagggtaggaagggggaaagactggggagaaaaatagctaacttttctagcgatagatacatgtcagaagctgtagtaggttcttttgcatgtgtttacttacattaccttctgtaatctgcattgcaattttttcatagacaaggaaacctagacttagagaagtacaatacctgtcatctcgtaaatgacagatatagttgagcaaatctactgaaatggtttagcttcttatctttccagacaacagataaggacttattctatatgaagacatctgagaaatgaaaatatggtttcaggttcatagaatcttttacaccacgtatttctggttctctttcttctattcagatcattctttcatctgtttcttttgtcttcttttccaaaatgtagcaattgccccaaattcagtacttgtctctcttcttaacaatcacatccaatcccatggcctcaaccatcttcccttgcatataatttccacatttacaactttattctcttgattactcaggataagataattgctgaacaaataacagcatatatctcagcttaagagagtaaaagtttatttttctctcatgcaaattctattgcagatattccccacctccttccctaggttgtcctcaaaatgcagtgactcagggaactcctctttctgtcttaacctattttaggtcttagacccctttggcagtctggtgaagccaataaatctcctctcaggacagtttctaaatgtgataaaagaaaaaaaagatatagtgacagatctaataattaaaattcaaagttaatttcaaattagtgataggtaaatatatttcaagatgtctgcactgaatacagcgtgataggtaatatatatgatttatcttggtgacaaagacattggtattgctaacactattatagctgccatctgtattcacaaagggagatgtcaaattccagttaaaagaaagattttcttaacccaagttcataggacttcctgaatggtacagatgctaaggtctagtggctccacaactaccaaagccttcttagtgttctctgctggatcttatgcatccaattgactgacaagcaaagaacctgcagaataataggagacatttgttgggtggggagagcaaacctagaaggggcatataccccttacaattatagctctatgcgctagaattagttatatcattcctcctagatatgaggggactaggcactgtacttcagctgtgtgtccaggaaaaaggtaaggtatggggaatgtggagcaataattatttgaagcaagaatcaccagtggatgctaaaattcgtgagggaaaacaggaccagaaacaggatatttttaaagtctccaagtacctccacataggatacttattaattgcaaagggaaaatagtaactttacagagaagaagaaatctggcagacactaccatatccaagtgatcaaaggtgacatcagtagtgggacacattaacatcatgtgcttctgatatgatacacaaaggagaaacaacctcattcttgtgatgttcctgccaaaaatccataacctgaaagaagcatcacaaaatccccaattgaggggcattccacaaaatagctggctagaactcttcaaaattgtcaaggtcatgaacagttccagaccaaaggaggctaaaagagacaggatgcctcaatgcaagtataatcctgaattgggtcttgggtcagaaaatgggcattagtaagacaattggcaaaatttgaataaggtcaatagatttgaaaataatactgtacctatgtgaatttcctgactttgatcaaagcactggggttaagttaaaacataagatgttgtttttggaaatacatgctgctatatgcaacttactctcaaacatctcagaaaaaaaaatagataagttcatagatagatagatgacaggataataaagcaagtgtgataaaatgttagcatttggggaatgtaggtaaaagtatatgggaatattttgtaccattttctcaacctttcctttaactcgtaaattacttaaaagaaaagcaataaccctggctcttataaaactaaggaaaatggtccatcctttcctgtgccttgtgttttcctgctggtcaaagaacctttggtaatgacaatctgagttggtcactgatattctagtaaattcagaatataacttcctgggctatgtagaaaaatatagctcttcatattttaattcattttcctgacagcacgtttctgtgcttttatgtatggatactgcctagtaatgtgcacaccagtcctgcagatcctggaacattttattatcttgatattgacttacgtatttaggtagatctgaatagcagaattgtcagtcgtttcaccaagacattatcgggaaatctggacttggaagtctacttctgccaggcatctctccacgctggcttctgggccacagaagaaaagatctaatcaaactcatttattaacaaaggcttataatattgaatagcagcttccaggaatctaagaaaatgttcacttttatttctgactaaggaggaactattatagtctttttataccagttagaagtgatgacttggtattaaacttattctaattctcaatagccctgatctcgactctgaccacatgcgcgcacaccctcccccaaccctgtaagtgtgattatggcaaggggaaagttaaagtggagtgaatggtgagtcgtggaatgacagagagcatttagcatttgtaattgacagagttggtgattgactgaatggacactgaatatctaggctaaaagtaattgaatgtggatggtgtagtgagatggagaacactagcaggaagatagactgggctacgcaggggctagatcatgtgttcagtctgggatatactaagtttgaggtttctgtaaaatgtccatgtgaagatgtccaattgggagttggatatttatttatgtttccattcccatcaatcgataagcttcagaggaaataagagtgtaagatttttttgaacaacaggaaaggaagattgtagtaagatatgatggcataatggtatatggaagagttttaaataaaagttagccaggcatggtggcacgcgtctgcagtcccggctactcgggaaactgaggcaggagaatcgcttgaatccgggaggtgaaggttgcagtgagccaagatcgcaccactgcattccggcctgggcgacagagtgagactccatctcaaaaaaaaaaaaaaagggatgaagagggatgaggagaactcaagttatattagcctgaatggaatagatgagtggagagatgggcatgataggtgagttaagaaggaaattctttgcctcagcaaccaactcagatgctttgtgaatctaaattatgtgttgacattctagtagacctagacctgggataattcacttcagcattatgtaatcttaatttttcatttataaataagaaaatattatgcaatacttgccatagttttctaaaagctgaactcagaatgttaatgaaattaaaatgggaaagctattttgcttagaagatattttgttataaacatttcttaaatgaagaggctctagaaatatttattttatagaatttaaaatatagccatcactaataaaggcaggcataattccaacgatttcataacacatcagttattaaatctaattaatatataaatgtaactaatatgtaatttaatataaccctaattcaatgtttaaccaactgaagctggttaaactatgaagaagaatcttcaaattgaccatttctttccaagcggtaaaggtgatacgggattttgtctatacatatagagcaaaggagaattaagccaagatttagaattttaggcaaaaagtgtttatagtatcattaagtggttacatatgtaattttactgttataaatatgactgagtcaatttttttttcaaagattttgtcacaatgggaggcacaaggagtttagacagatgaagactctttctagaaatctacctaatctatcacattagacctggagataattggtttgacaatttcagttgtttctcagcaaaaaaaataagaaactaaaagtgttcagatggcagagaaaaaagtttgaagaggagagaaagaagaacaaaaagaaaaaggaaacagtagacatataaagaaagcacctaaaccagtgagatgccccagctatgcaccagcagcatggtggattacagtagagtttttctacagaactattgtaaatcactggaaaatagtgtccaacttatttgcttaaaattttcagttaatgtgctccagcagcattctgtagacaacgactctcactctccccttattatggaggcagagctgtttctctttgtcccgttctctagcctgtgatatactttttattgctcaagagctatagaattgtatccatgcctattgttgtcctcctgatgggaattcatgtaattgaaagcgtttatcctctcttagtagaaaaattgggcacttggaggcaatgaaaatcccccacctttgtccacggcactggaaatactcttcagtctgctttgttctaaagtttctacttttcccagtataacctgttgaaaatttagtccttcatgagaaatacggctggaatttcttgtggcaggctggccgccggtgttcatgtagttacaccttttgttgctatttcaccactgatcaaaaaataaaattgtattttttcaaaagaaacatggaatgacatgaagaaagtccttaatatatcatggagtgaaaaacagcaagttgccatgcaaatgtcaaatagatcctatatttttaaataagcaactgcatatgtatcatttaaatatatatgtttagatatttgctaaattatgaaccgcagttacccctggggagtgaggttaggaaaagtaaagtgagattttcactttttacattatactttttactttacccacttctgtattgtttgaatctttaaaatgaacaagtgttattttgtaattaaaaaaaacaacaactgacaaataactatggggagtaagaaattacttggaatggaatatgtttaaataattaatttgttgatacactgcttgactattattttcttttgctaaatcaaaactcccctgcttttctcaggaggttgttttgaaaagaagggtaaatgtttctaatgaaatgaacagctcaaccttcccacctcctgcctaaatgcctcattttggttttgttactaacaaatgcaacacgcaaggctttatggtaaagcaagcaatgtgggtttctaacagggcagtacacacccgtagttgctgggaaaccactttagtaatggtggatttattgaattggaacaggaatggagatttggaacaacaggaagtgaggtacctgtaggggtctcagttgtcctgggcactgtgacatggcacccaaatgtcatgcaagagtggcccttccaacatatgcaccaatctgaatctctccaaagtttcttgattacaccataaaacaatgaagagaacagcattgccaataacttcagtaataacttttgcatcatattacaaagggtggtgggtggcactttgtgtggtcatgggtatgtccaaaagaagggagtggtggctagactcagttctcctttagattttaaggcaaaatttagcaaactctatggcagattcttcaactatttgtcagacagacattgtctacttttctggggatttatgattgaggccccttttgaggggagctttgagtgcagtgaggccagatagaagggccaagaaggatgggagcagctgcatgctagtgagcaattcaaagttggattgtgctgactggaaaatcccggttagcaaatcaactatcacagacttcatattcttttcagatgtgcagcctttataacatatttgtaaatgctaaaggactgctccacagggaggttacaaagagaaaagctctgggtggttgtaaaatggacaaattgtaaagccttactagtagtcttaccattcctctcagctcataaaaaagtcctcctcttcatttgactatgcctcaaatctactgcttcttggattattaaacactcttttcctccaggatcttaaaatctctctgttataagttgaattgtgtccccctcaaaaatgatatgttgaggtcttaaaccccagtatcctagaatgtggccttatttggaggtggggtctttacagggttaatggaattaaaacaaggccactagggttggccagtcctttttataaggaatccagtatgactggtgtccttattaaaagggaaaatttggacagagacacacacatagggagaaagacgtgatgatgaaggcagagtggggggtgatgcttctataagccaacgaaccccaaagattgccagcaaacccccagaagctacagagaagcatgcaacagattttctatcacagccctcaaacagaaccaaccctgccaatgctttgattttggacttttagcccctggaactgtgagacaatacatttttgatgtttaagccacccactttgcggtgctttgttccagcaaccttgggaaatgattacactttctcatctgtgatcacagtgaggccttgtcacaatcttcactcattccttctatagaaagctgaaagcctatggacaaggataattgccttggctgacgcatatgtttgaaggcagctgctggcaggcaaccggagactttaccctggtcctagtggagaggaagtctataggaggaggcagggagccttcctggctggcaacccagtgactcaggttgttttcttactccaaggatctctgtgcaagtaggaatcctgacatcttctctttttcacttgtttatgagaccctgcttgttgtagagtaaagagcagaacttaagaatggaatctaatcaccttgaaagaataatctctcatctcctctggtggcaaaggattgggatgtggaggttatagttggaaaattgattcctaggtcaatgtctgtgggtgaatttctctttgaattgttatcagcaatgttatggtgttcggtggctttcaacgaaataaacacacctgacatccttagtaaagagaaagctttctgaaataagagtgagggacagactgggacatgatgctttgcatgaaataggtgttcagtaagtatttgtagagttggaagaagttagattaaacagggctattgtatggcacattgtcattagggagttagagagggcttctggaaaggtttggtcagttttgacttaccttgcaataaatttggactataataaccatttcactagtttgtaaaaggtactggcaaccaaagatggggaatgccactcaatctcacttgttctactttcaaaagcttgctttggtcacattgaaaggttccatttggtgaagtatagcatatcacagaaaacaatggagtttgggagttcgggaacaaatggttgttttgtgataatgaataactttgacatttcgtttgaagttaagttatgttgtttgaacttttctgtccctgaacaaggcatcgtatgccaagaacaggtaacagtttctggatcactggggactcattagtcatggatggttagtggtactacattgtggtcttccttcaatattgaaagctgtaagaagcttgtgacaaattcttaccttggccctcacacagtactggtagggctgggatgttattgcttttgtccaccaacttccaactgtagaagtctaggatgatcacagcagttagagatgatccatttagatagtctatattaagggaaagtatccttcatccatggtgttgaacattcgtaggattaaaatgaaagaagccaaaacctttctagatctttattggtatatcaacagaattagctgattaggtatgcagaaaaaacttgggacttgaagacaccattaaataaataactgtacataaccatacattaaataactgtaacaccattatataaataactaactataaataaagagctctacattcaaactgcttttcactgcatttgtcagatttcacttttaatataattttagttgacttatccctcatcttaccttaagaagataatgagttgaggtggatcttgagccagtgtttagtccaatatagccctttgacttggggaaagatcaaacttcgaaatttatatgcatgactcctctctgggcaaggactgaagtggcaggagaggtgaaagaaggaatcaggacaaaaagtagatgctaaaaggaaaacagtctgtcccgtggagaggaagtacccaaagaaacagaagaactccatgatggagagtaatacaagttgaatatcccttatccaaaatgcttgcgaccagattgttttggctttgggattatttcagattttggaatattttcatacccgctcagtatccctaatctgaaaatccaaaatctgaaatgcttcagtgagcatttcctttcagtgtcatcttggccctcaaaaagttttggattttggagcattttgaattttggatttttggattagggatactcaacctgtactagcgtgttaaaacagtcctggccaggcgcggtggctgacacctgtaatcccagcactttgggaagccgaagcgggcggatcacaagatcagaagatcgagaccatcctggctaacacggtgaaaccctgtctctactaaaaatacaaaaaaattagctgtgccgtggcgggcgcctgtagtcccagctactcgggaggctgaggcaggagaatggcgtgaacccgggaggcggagcttgcagtgagccgagatcgcgccactgcactccagcctgggtgacaaatcgagactccgtctcaaaaaaaaaaaaaaaaatccaaaaaacccaaaacagtcctagaggctacagcctagagcagtgggcaaagagaagcagaatctacagaagatattgttcaaggcctgctatgctaggtctcagatagcaccagaactgggcagggcaagaaacgtcaggcccaggggtctggtttaaccagaagaggtgctgaattttaggatctgaatagcaagggttgtggtcaggaagtcagtttcatgtaagaatgaaggtgagcggatcttaaatccctgaaaggaggcagagagaagaatataggaaatgggtggataatttttgttgcgagtaaaaatgttcaggactttggaggcaggaagagcaggtaaagcaagttcgaggaaagaggctgggtcagaggggatctgaaagcaggagtcagaaacatccattggaggcctggagaacataaatgggaggtgaatagactggggacatagtgcctgggtggaaagaagctggctcgagtccgaaaccacaggctgaaatattaggaaaaagagacccaggaattcagttcagaataggagggatttgtggggcaagaccagtggttcttccagacattttatcagagataacaaagcagaggctgtctgttctctgcccttggtgtgagaagaaaaggactgacaggagtgcttggcagctcaagccagttatggagctgtgggtgctagtggctattaactaccagggaattagctctgctgaatgagtcctcacgcagaggcagggatagaacgttgcattcagaagactggccacggaggccggctggggtggctcacgcctgtaatcccagcactttgggagaccaaggcaggaggatcatctgaggtcaggagttcgagatcagcctggtcaacatggtgaaaccatgcctctactaaaaatacaaaaattagccaggcttggtggcgggtgcctgtaatcccaactactttagaggatgagagaggagaatcgcttgaacccgggaggcagaggttgcagagagccgagatcacgccactgcactccagcctgggcaacaaagagtgaaactccgtcttaaaaaaaaaaaaaaggaaaagaaaagaaaagaagagtggccacagattggcttggctggagaaggcatttttttatagggagatatacgtgagtttgacgggatgggctagcaggcggacattcaggttttatgggataggcaaaaaggtacaaatggtatttggggggatgtgaatggcatctgagaaaggttgatccaggcttgtgtggaagctggctctgagcataaaatgccagagaaaggcttgtacaactctgaggtcttttcttttcttttcttttctttttttttttgagacagagtcttgctcttgtcgcccagcctagagtgtagtagtgtgatctcggctcactgcaacctctgcctccctggttcaagcgattctcctgcctcaccctcctgattacctgggattacaggcacctgccaccaagcctggctaattttttgtatttttagtagagacacggttttaccatgttgcccagggtggtcttgaattcctgacctcaagtgatctgcccacctcagcctcccaaagtgctgagattacaggtgtgagccaccgcacctggcctattttctattttttaaccagtcccaagtaagggtattggttagggttgaggcaatggaaatctgaaagaaagggtgagttaggtatttcactggacacatgtggagaatgttggtgatttaatgcagagggaattgtggttaaaaaggttaatgtaagaagggtcatgtggggactggaaatcacaatagagaaacagaggccagaatgctgaactcataggaagtgggtgaccatgggtgattaaaatgtacaatagggctgggtatagtggctcatgcctgtaatcctagcactttgggggactgaggcagttggatcacctgaggtcaggagttcgagaccagcgtggccaacatggggaaatcccaaccctactaaaaatacaaaaattagccgggcacggtggtgcatgcctgtaaccccagctacgtgggaggctgaggcaggagaatcgcttgaacccaggaggcagagggtgcagtgagccgagactgcgccactgcacttcagcctggggaacaagagcgaaactctgtctcaaaaataaataaataaataaataaaaataaaaaattaaaatgtacaatagagtgtgtaaaaccaggaaatctacatcttgacacttaactacccaagacgcaattggttcctcgtctgatttttaaaagaagtttccactttcttcggaaaatcacgacagtccttgttctcaatttctttgtttttaagaagagaaatgttgtatgatttcacttatataaactacctagaataggcaaattcacagggatagaaaggtggaatggaggtgaccaaaggtggaaaggaaggaggattgttcaatgggtacaacatttctgtttgggatgatgaagaatttctggagatggacaatggtgatggctgcacaacactgggaatgtgcttaatgccattacttaaaaatggctaaaaatcatgcattttatgttatgtatatttacaacttttttttttttttttgagacagtgtcttgctctgtcatccaggctggatggcggtggcatgatctcggctcattgcaacctccacctcccaggttctagcaatgctcctgcctcagcctccccagtagctgggattacaggtgtgtgccaccatgcctggctaatttttgtattttgagtagagatggggttttgccatgttggccaggctggtctcgaactcctaacctcaagtgatctgcccacctcagcctcccaaagtgctgggattacaggtgtgagccaccatacctgccatatttacaacttttaaatcataggaaagaaaccactaatgctttgacaactgtgagattttgaatctcaactgtgagattatggtttgtggaaatttctttatgtgattaaaaaagatactttttttgccaaaaaatttgttttcgctgtcatgcaagttctcctgggtaagcacctttggtcttgttttgtgcatagcatacagagcagcaattgtatattgctaaagaaagcctgttttttttttcttgttaatttatttaagttccttgtagattctggatattaccctttgtcagatggatggattacaaaatttttctcccattctgtaggttgcctgttcactctgatgatagtttcttttgctgtgcagaagctctttagtttaattagatcccatttgtcaattttggcttttgttgccattgcttttgtgttttagtcatgaagtctttgcctatgcttatgtcctgaatggtattgcctaggttttcttctagggtttttatggttttaggtcttatgtttaaatctttaatctgtcttgagttaatttttgtataaggtataaggaaggggtccagtttcagttttctgcatatggctagccagttttcccaataccatttattaaacggggaatcctttccccataaggatatgaacagacacttttcaaaagaagacatttatgcagccaacaaacatatgaaaaaaacctcattatcactggtcattagagaaatgaaaatcaaaaccacaatgagatactatctcacactagtcagaatggttgttattaaaaagtaaaaatataacaggtactggtgaagttgcagagaaataggaacacatatactgttggtgggagtgtaaattatttcaaccattgtggaagacagtgtggcgattcctcaaggatctagaactagaaatgctatttgacccagcaatcccattactgggtatatacccaaaggattataaatcattctactataaagacacatgcacacgtatgtttattgcagcactattcacaatagcaaagacttggaaccaacccaaatgtccatcaatgtttgaccgaataaagaaaatgtggcgcgtgaacccgggaggcggagcttgcagtgagccgagatcccgccactgcactccaccctgggcgacagagcgagactccgtctcaaaaaaaaaaaaaaaaaaaaaggaaatgtggcacatatacaccatggaatactatgcagccataaaaaagaatgagtttatgtcctttgcagggacatggatgaagctggaaaccatcattctcagcaaactaacacagaaacagaaaaccaaacactgcatgttctcactcacaagtgggtgagttccataatgagtgggtgagttccacaagttccacaagtttcacaagtgggtgagttccacaagttctataatgagaacatatttgcacagggaggggaacatcacacaccagggcctgtcggggggttgggggtcaaggggaagaatagcattaggagaaatatctaatgtagatgacgagttgatgggtgcagcaaaccaccatgacacatgtatacctatgtaacgaacctgcacattctgcacatgtatcccagaacttaaggtataataaaaaagaaaaagaaaaagaaaaaaaaccctgccttttgctttggcagtcatcattccttccatcttctcatgttttcttatttaactcagtagttctcaattgacagcacaaaagaattactcaggagagttcaaaaaacacctatggctgactcccccaagattctgatttccttggtgtggggtagcctgggcatgaatattatttaaaaactcctctcatgattctaaggtggtagccaggattgaaaaatgctggactttcaagtttttgttttctttcttttcttccaaaaaggtgaagccctgacttgggaagaattcaaatgcgagttaggcttatgtttgatgtcactgattcctaaagatcagtccattgattctcctcattctcaggagagcatttggtgtcaaaatcacagcccaaaactcttaccctagttcagcatctaactctcttcagtcctgaaactgtttttgtcactctgtccatataatcacagtgttgtagaaatttccagctaaacattgtctcaaactttttgtacctagttttaaatcaaaatgtagtacaaaattattaaatacaacgggctttaaaatattgagattttggtgatcttttttgtagaatgcaaatactaatgaaactaattttttcttttgctttcaaactatacatttcttctaaaacttctttcaaagtagaatttcataagtggaagaacccttgaagattattttaatagaattccttaattttagagatgaggaaactgagactcaaatatattaattaatttatctaagtgtcttagtccattttgtgctgctataagagagcatacttgagactgggtaatttatattgaacagaaatttattggctcacgattctggaggttggaaagtctgatatcaaggtgctggcatctggcaagggccttctggatgtgtctacatggtggaaggcggaagggccaagaggtaaaatgtggctgaatttgtgcttctattatggcatgaatcccatccatgaaggtggaggcctcatggcctaatcatttctcacaggcaccaccttttaatactgttacaatggcaattacatttcaacatgagctttggaggagacaaaaattcaaaccatagcactgaagttatacaactagttaagaagagagaacctgagactgaaaccctgatgttttgactcccaatccagaatgtttgatcccctacatcccaccgcttcgctgtttccattcctttctcctgttttcatctattttcactaagagggcaagatatttgctaactgctacacacccaaattgtataccaggcaggtcagaatgactctaacattttatttaatgaggcagaataaaatatcttcctactaaacagtgacaagtgtttgttttaaaaaaaagtattgtgcacaaaaaaaaaaactactttcagcataggctatattttacaaaataaatttacagtgggaaccacagagctatttagagtgtctggtataaatgattttattgttactctgcttttttgaaaaagaagtgtgtgaagcagaggtaagtagtactgaggaaataataactaaaatactaaggacgagatgcacatgggaaaagttcttcattaactgtaacgtggtggagaaatgtatgttctagacaggtcaatcatggaattagaaaaagttgggatcttggattgttgagttcaaatccttagttttaaaactgaagacttcaaattttgattgactacagatcaatcaacaacctgttggagttggaaacttgaatctgattctccatccttgtttgggatatgaaaaaaaggaagacatttaagagtatttttttatttatgaaactaatgtatcatcatgtaaaaatatgaaatagaaagtgttaaaaattataaagaaacaagaatgtgtttttataatctcattttcttactttacgtaagatggtaagtctattttggaattaattgtttttaagaatagtattataattcaatgttagataaagatttatttaaccctttcccctttaacaagtgtttgggttttttaagtttgcttccaagttttcggtaaatgatgcttcaatggatatctctgtttgttatcttagtatgtatcttagattaattcctcaagataaatatttaaaggtatggtatatgtaatattcttgatacatacttccatatttccctccagaaatgtgtgcacctatttaaatgtgtgtggaggtgcacattttaacattcctcattattctggctgccttctataaatcaagctaccctggtattatggctctcctccagaaatctaatcatttaaacacatgaagtgaatgtgtgaatggacaattaagtgctggccaaatgtggaaaaatgttaagtgtaaatcaaaggcaactgaaacgttaaatacaccttccattcctccgccacatccatgctctttcccatactccacatctgctcactaaaattggaaataaactgtaatgaaccagaaatgtctgacttactggtgtgtttaggtgagttttattgaaacactgactgaccccaccactctaataccatcaccttaatgtttgtatcttagattaattcctcaagataaatatttaaacgtatggtatatgtaatattattgatacatacttccatagttccagcaaccacttgtcatcctgtgtcccccaaggacactgcaatgactgtcacagtgacttgtgctcggttgaggagcaagtggtggctgaaatccagccccagtcagctccccaaaccaaaccacttttacacagtgtctatgtgtaaagttggtttgctttggggagattgatccccataagggatcagcaccagccctgtgtctatctcttcttctcctggggagatgttggctattttgctagctggagaagggcacgcaatttgttgtcaggagacaggttcttaagttccattggtacatgcagggcaagacaggcagagggaatctgtcactgctacaggcacttcataagcccaggtatagacgataattgaaatggattgatttcatagtagtctaatacagagtggtgctacaatctctgtatgtgcctatttagaaaataacttcatatttaattcttcactttacataaaagatatgtgtattaaatacaccttttattttagaacagttttagattttagatttaaattgggaagacagtagagatttcctatctaacccacacccagctcccgtattagtaactaacatcttgcattagtatggtatattacaattaatgaaccaatactgttattttattattaacttaattcatgctttattccagttcccttagtttctacccaatgtccgttttctattccagtatcccatccagaataccacattacattctgttgccatgagtttctcagattttccatgtttttgatgaccttgacagttttgaggaatactggtcaagcgttttgtagaatgtacctcaactgagatttgtctcatgtttttctcatgattaacttggtattacaggtgttttgagaggaagaccacagaaatgaaatgccattcttattacatcatatcaagcatatattctaacaatatgatttatgacaactaatgttgaccttggccaactggctggggtagtatttgtctagtttctcctctgtaaagtccttccttaccccctttccacactgtactctttgaaggaagtcactctgcacagctcacaatgaaggagtggggagctatgcttcccctctttgagagttgtgtatgtacacaaattatttggaattcttctgcatgggagatttgtctattctcccctatttatttatttattgaattatttatatcagtatagcttcatggatatttattttagactttgggctaaaaaacaatactactttattttattgttcaaattgttccagcttctagaagttatatttttatagagaagatatgtttttaaatataaaaacactttaaaaaaatgaagtcaacaggataaaatatttttaaattttccttaatgggtgttctttgtaccatgtttccatcaaataacattctgattgaaatctaaaaattagtgtttgtattttaagtgctaagatcagagaaaaagtcacaagtttcccagactgagttaggcaacatgtgactcagagttataaggaatacctttcccattcctgcattgcaaccagtgttacagttacagaagtgactagtgtaacttcccctcctgggttccagctgccaggacttactttagttcttttaacatatccttcccaccaaagataagttttttgaacagtttccccatgagtgctccccccaccccaacttgtgccttttattcatgtctttataatatttattggttggctggtgcaattgcagaggttggcaagtctgaaatttgtagagcaggccagcaggctggaaactcaggcaggagttaatgctacattctagggacatttttttcttctctggaaacttcagtttttgctgacaagcttttcaactgattgggcaaggcccacccatgttatgagggggaactgtacaatcagttgtcatttaagccaatcagtcaactgatggttggtgtcaaccatatcttcagaataccttcactacaacatctagactcatgtttgattaaataactgggtgccataaccttggcaagttgacacctgaaattggccatcacagtgaccaagacagaaagtgtaatgagcaggaaagcaccccagtgacaggacagtgaaagatgagcctggagacggggagtgggaggagtgctttgacagaatggtcaagagagatggcatctgggtggagatatgaaaagatgtaaaagaagggaaggaaccagttctgccaagaatttatacttctacaatttcccagatgatattgatgctgttgccctggagcccatactttgagaaccacagagtaagggtatacctctgttattatccaatgaatcctgagaaagcccattaatatctcagtgtgaccattttttctcaaaattcctacctcacatgctctgaggggctggcagcttttctgggaaggtaaaatctcaagagggaggctttgaatgattccaggacaaagtgaagataacatactaccgcaggtaaagtctaggtttacttggaggtggctcaaaacacaaatcctgtcaattttaatgacacatgaggccatgactctgggtcgtcactctgggcaagccattgaacccattagaacctcagttttcccatctgtacaaaaagaggtgataatgggtaagcaatcctggactgcattgtggtagtgccatcaagcaatgagatttgtcaggaaggaagtgtgattcaagtacaggcactttgttatctgatgcctgtgtgttgagtgtgaaggaggggttaattattcctctattcatgtcctttctattctcaaaatttcttatgtgggaggaaaatcttggtgcggtaaagatcacagccaccctggggtcagacagaggactgtgtcaagcttggtaagcgtcaccattcaggtgagtgggaaagagactgaaccccattaaaccagatgacctccaaggccctgcccgccccaacatctgagggctgcctggcttgtctgcacagggtgctcacagtactcctgactttgacataattttaacattaaagtcacaaggatgccctggatcacaactgctggagaagagatggtagtgggatttgtttcccaggagactttctgattctagtggggccaggaccaacctccaaaataagaggtctttgcaactgctgcgagcctcctggcacctctaccctctagcgagaggctgcctctcctgccccaccccggtttcaagcacgctgcagggcaggaactcactgtgctggcaaaggtgagctggagacctggcacggcataaagcttttttaactgaccctttttaatttcatcttccctggacttaatctagagagtcattgatgaaacaaacatgccattttctcccgatttcacgcttttaaatgtcaacaacaaacaaacgtttatatacacaaatgttgctgaaggagacttttggctttagacaagggtaaaaactgaacctcttagtgtgactttggttgattttttaaaaaatctgtaatttgacatataaagaattattaagactttttttttttttctggtaggcattgaatgtgtccttgaaaagaaaaaaaatatgctcagtttcaatcttctgtctatgggtagctagttatcccagccttagttattgaataaggagtcttttcaccattgcttattttattttactttttgagatggggtcttgctctgtcacccaggctggagtgcagtggcacgattttggctcactgcaacctccgcctcccaggttcaagcgattcccctgcctcagtctcccaagtagtttggattacacatgtgcaccaccacacctggctaatttttgtattttgatagagacagggtttcaccaagttggccaggctggtcgtgaactcctgacctcagttgatccaccccacttggcctcccaaagtactgggattacaggcatgagccaccgtgcctggctgcattgcttatttttgtcagctttgtcaaagatcagatagttgtaggtgtgtggtcttatttctgggctctctattctgttccatcagtctatgtgtctgtttgtgtatcagtgccatgttgttttggttattgtagccctgtagtatggtttgaagttggataacatgatgcttccagctttgttctttttgcttagattgtcttggctatttgggatctttttttggttccatatgaattttaaaatagtttttttctagttctgtgaagtatgtcactggtagtttgataggaatagcattgaatctataagttgctttgagcagtatggcccttttattgatattgattcttcctattcatgagcatggaatgttttttccatttgtttgtgtcatctctgatttatttgagcagggttttgtagttcttcttgtagagaatttcacctcccgggttagctgtattcctaggtgttttatttcttttgtggcaattgtgaatgggattgtgttcctgatttggctctttgcttgactatttttggtgtataggaaggctaagtgatttctgtatgttgattttgtgtcctgagagtttgctgaagttgtttatcagctgaaggagcttttgggccaacactatggggttttctaaatatagggacatgtcatctgcaaatagggatagtttgactacctctctttctatttggatgtgctatatttctttctcttgcctgattgctctggccaggacttctaatactatgttgaataggagtggtgagagagggcatcattttcttgtaactggaccccttccttacaccatatataaaaactaactcaagatggattaaagacttaaatgaaaagcccaaaactctaagaaccctggaagactactgaggcaataccatcttagacataggaatgggcaaaaatttcatgatgaagatgacaaaagcaattgcaacaaaagcagaaattgagaaatgagatctaattatactaaagagcttctatataacaaataaaactatcaacagagtaaacagacaacctacagaatgggagaaaatttttgcaaactatgcgtctaaccaaggtctactatccagcatctataaggaacttaaatttacaagaaaaaaacaacctcattaaaaagcaggcaaagggcatgaacagacacttttcaacagaagacatacatgtggccaacaagcatatgaaaaaagctcagcatcactgatcattagagaaatgcaaatcaaaaccacaatgagataccatctcacaccaatcagagtggttgttattaaaaagtcaaaatataatagatgctggtgaagttgcagagaaatgggaacacttatataatgttggtgggagtgtaaattagttcaatcattgtgaaaaacagtatgatgattcctcaaagacctaaaaatacaactaccattcaacctagcaattccatgactgggtatatacccaaatggatataaattgttctatcataacgacacatacatgcatatgttcattgcagcactattcacaatagcaaagacatggaatcaatctaaatgcccattgatggtagactggataaagaaaatgtggtacatatacatgatagaatactatgcagccaccaaaaagaatgagatcatgtccttttcaggaacatggaaggagctggaggccattatccttagcaaactaatgcaggaacagaaaacctaatactgcatgttctcacttgtaagtgggagctacatgattagaattcatggacacatagagaggaataacagacactggggcctatcagagggtggagggtggaaggagggagaggatcaggaaaaataactaatgggtactaggcttaatacctgggtgatgaaataatctgtacaacaaacccccatgacacaagtttacctatgaaacaaacctgcacgtgtacccctgaacttaaaataaaagttaaaaaaaaaccccaaaaggtgaagtgttggtgaggatgtggagaaaagggaacccttattacacaattagtgggaatgtaaattagtgcagccattttggaaaatagccaaggaaaatttttttattgagtcagatgatgttaccttacagcaatagcttccaaaggggatgtcctgaatagtagaacttctctttacattttcaaacctctttttactttctgattttgagtttcataatgaacatgtatcaatacaatagcacactatgtattttataaatgaacaaatatgggaaaaataagatatgttcactttcctggctgaccctagttagtctaaactatcagttataggatccatttgttctaaatattgaaggcattgttgggggcagtggggagggtgaatgatagacgcaaattccttgaaggaatagaaatgtgactactatgctgaaaagcaggacccatggagtataaatagagtattcactgtgcttttacatttgtttccctggaggaaacgtaaaacaaatctcaagactttctggtcatttctaagtcataaacggccactagtcactaatttatataaccagcccaatgtaaatatcaaacgtgtgagtttcatttcatctcacaactcctcccctttcccagttctggccccatacaagcccgctgcctgcagtgtaatggaggaagatggtttctttttccttccctcccatttatttgtctttgtgcatcttaaagccagcctgaatttctactccctacaaggttgaagtgggtgggtcaggaggtggggagagagctaaggaacgttggcgtgagttgttgttgtgtttgagtctggaaggtgttgggagctgccccccctcactcagggcctcatttatgggctcttcggataacccccatgctctagcactgggatcttgccctgtggatccctccatgcaggtggcaccacaccctctggctggttgtgatgggccttctcagctttgagaattagcaacacacttcctattgaagtcatctgtccctgtgggtagcccacttgggctggatgcaaactgaacctgcactgattctctcttgcatgtggcccacatgagctccattttcctccgcaaactttgggtgcacagccccacgacgacacagacagcttttcttgcgtgccaccaaagtggtgggccagagttctcttatccttaagattttcaggtgtcaccacgtccaccaattcttggcagacatgaatcaatacttccaagggttttggtgaagcccttttccctgggctgcagatgagggcagccatgtcctgtctcttccacctgttgtggaaggggttcatggcaaacatcttcgaacatcctctaatttcccaattcttgatcctttcgtatgcttgatgtgtgagagagaagagagaagagagaaacgcttcttgctgctttttttttttttaatcccacatggtgaccttagactttactttggaatgtgccatttaatatctggggacctcagcccaacacagggactaaatagctctgttttaacattttgtttatatacacacattcatttgaccaaatgaacatgttccagcttttttaacccttgcccagcaaatcacttaattcagttaataaaaagactaaaataatgaggccaaccttattggccacgaacatctgttgggtattcctaaattgatccctgagttaatctccacctttaaggagtttataattttatttggcaaattgatgttataatgaaattcctgggcatgaaaaaaacctaactatgtaatgttggatagtgtgagttttcccaaaagtaccagtataagcaataaatgctataactgatcatgaattgtttacagtgattgagtagaatcattgcatctggtcatgaatagaaagagcacctcccagacggctggtctgctgccaggtgtgcagttttaggggtctccacactcattctattcacatcttttgactttatcagctgtgtggtggatctgtggttacaggctgatgtggtttggctgtgacctcgctcaaatctcatcttgaattgtagctcccataattcccacgtgtcatgggagggatccagtcggaggtaattgaatcacgggggcgggtctctcccgtgctgttctcgtggtaatgaataagtctcacgagatctgatggttttataaatgggagttctctttcacgagctctcttgcctgccgccatgtaagaagcgcctttgctcttcctttgtcttctgccatgattgtgaggccttcccagccatgtggaactgtgagtccattaaacctctttcctttataaattacccagtcttggatatgtctttattagcagtgtgaaaatggactaatacatgagccacattgttacagagtttctgaaggtcattaagagaagtccatgctgtgggctgagctgggactcaagaatctcaaaggagagccagtgcaatcaacacgaagggcccatcttgaactcctaaggcagggcagagctgggtcttatggagacatgtggctttcaggtaatccagtgagcacctgtgttttcctcctataattcttgaggaatggatattgttctatatttcagatagtataataataaatacctggaaaatactgtatgaccccaaacaacaggtaaaatgtcaaaaaaaaccttttatctacacaaagttagacaacaaattcaaataatcttatccgtttattcattctcttccaatacaatcatgtatcatttaatgatggggatgagtttggaggaaggtgttgttaggagattttgtcatggtgcaaacatcatcaagtatacttatgccaacctcagtggtatagcctactacacatctaggcttggatagtacagcctgttgctcctaggctataaacctgtacagcatgttactgtcctgaatactgcggcaactataaaataatggtaagtatttgtatatctaaacacacttcaacatagaaaaggcacagtgaaaatatggtataagagataaaaaatggtccacctgtacaaggcacttgccagaatggagcttgcaggactggaagttgctctgggagagtcagcgaatggctgatgagtgaatgtgaaggcctagggcattattgtatgctactgtaaactttataaacactgtgcacttaggatacactaaatttattaaaaatttttctttcttcaatcaataataagtgaacattagcttactgtatttttttttttactttataaactttaatttttttttagagatagggtcttgctctgttggccaggctggagtgcagtggcacaatcatagttcactacaacattgaactcctaggcttaagcaatcctcacacctcagcctcctgggtagctggtactgcagacgtacactactgcacccagctaatttttaaattttttgtagcgactgggttctgctatgttgaccaggctggtcttgaactcctgactcaagcaatcctcctgcctcagcctcccagcatgctgggattataggtgtgagctactgcacttggcctaaactctaatttttaaaatcttcttgactgttttataataacacttagtttgaaacacaaacacattgtacagctgtacaaaaatgttttctttctttacatccttattctataagcttttttctgtttaagtttttaaaaatgttttagtctgagtgcgggggctcacgcctgtaatcctagcactttgggaggccgaggcgggcagatcatgaggtcaggagatcgagaccatcctggctaacacggtgaaaccctgtctctactaaaaatacaaaaaaattagccgggcatggtggtgtgcacctgcagtcccagctactcgggcggctgaggcaggagaatggcatgaacccaggaggcggagcttgcagtgagctgagtttgcaccactgcactccagcctgggcgacagaacgagactctatctcaaaaaaaaaaaaaaaagttttaaacctttttaaaaaatcaaagtcacagacacatgcattagcctaggcctacccagggtcaggatcatcaatgtcactgtcttccccttccacatcttgtcccactggaaagtcctcagggacagtaacacccctggagctgtcatctcctctgataataatatgggcttctggaagacctccagaaggacctgcctcctgcctaatgctgttttacaggtaatatttttttctagtagaaggagtacactaaaataatgataaaaactgtagtaaagtaaatatataaattagtcatatagtcatttattatcataatcattatgtactgtacataattgtattgccagacttttatacaactggtggcacaataggtttgcttacaccagcatcaccacacacgtgagtaatgtgttgtgctgtgacattaggacagctacaatgtcaggaggcaataggaatttttcagctccattataaccttacaagaccactgtcatatctgcagtacaaaacatcattatgtggtgcatgactatatttactgagcaccaaatatgtgcccaggcagtgtgctaggggctggaagtgacctcgaagtctagtaaaaaaaccacaacagtaaaacaatatgtgtaattcaaagtgacatatcctgtaatagctggttgcctacctgctccccagagagaaattaaacctgcttgcttaacttattaattttaaattcatgtacttgcaatataaaaacatattttaaaacatattaggagaataggatgtcttctgtagtgataggctatttaatgttctcttcactgtgttctaaaaaaatcgtgatcgagtgtaacaaaatggggaagggagggttagcataaactctcctttgatgtctatgctgtggatcagaaaactcatgaatatgttaacaactggattttctcctaatatgaaaacaactctttggcttcttttgcaaatgtgaaaagttaaccataaatataagaccttttctttccactaaaactagggcacaatcattgttttcctcttattggagtccaaatgggtttccataatcttcagatctagtagttgtatttatcgatgacataaatggaaagactaaaagataaagttaagaaaaattcagtggtttatggcttcaactctactgataattttgtatataaagggatcctaaattagactgtacacacatttgccatttgagttccaagcattttagcaatagatcaaaagatcttaatgcctgatagttgaaagattacttccaaattttttttatttttgtgaaagccaaagtccttttctcaacatgacagtcacaattttgtcaacaatctacccgttatttacaaaggtttaaaatctgataatagatatttacttggactatacaatgtctcagtgggagcaatagatggtttacaatgggtctgaaaatgttgcaaatagtcaaaactggcattgcaacaattcatttccaaaaacacactagactcgtgagtttttggtttttaagtttatatagcttgcttctggtgttaacgttctccacacctaaggtgccaacatgcatggctactctttgtccccagagaaacattgctaatttgtaccaaatttcaatgatgtgtcaagcaaactgtcattttggaatgatagtaagcacgccttcaacaacagctctttatttcgtccaaaacctttgggccacacaattctgacctttatcacactctcagtacctttcattcattattagcttgtgcttctggggccccgggaattgtcaactatggtcaaaataatggagcaaaatagcaagaagaacttgcgtttcctatatcattgcatttaatctttgcaacaactctttgaggtggaaattgccccaattttatagattcagcttaaagaccttgatttgtccaagatcacacaaccactaggaggtataatgttcaaataaaaatgtctgaaaagagctgggtgtggtgggtcatgcctgtaatcccagcacgttgggaggctgaggtggggggatcacctgaggtcaggagtttgaaaccagcctgggcaacatggcgaaaccccgcctctactaaaaatacaaaaattagctgggtgtggtggtgcatacatgtaatcccagctacttgggagactgaggcacgagaattgaatgaaccctgtgaggcagaggttgcagtgagctgaaatcgcaccactgcactccagcccaggcggcagagtgagactccatctcaaaaaaaaaaaaaaaaaaaaatctggaaagatagattacttggcctcaatcatagtaaaaaagtgtcagttaaaactgcatggagagatactattttgaaaagcatcaaaaagttcgaagatccatcatatttgtaaggctatgggagtttaaattgtacaggcgttatgaaggcatttggttacatctaccaaaattaacaccgcacatatttactcatgtgcaaattgacttatgtacaaatttactaattgtagcattgttgataattgtaaaatattaggaacacacctaattgccattaatggggaactggtaaaataaactagaattcctctgtgcatggaatactatgcagtcatcaaaaatgacgaagatgtggccgggtgcggtggctcacgcctgtaatccagcactttgggaggccgaggtgggcggatcatgaggtcaggagatcaaaatcatcctggctaacacagtgaaaccccatctcttctaaaaataccaaaaaaaaaaaaccaaaacacaattagccgggcatggtggcgggtgcctgtagtcccagctactcgggaggctgaggcaggagaatggcgtgaacccaggaggcggagcttgcagtgagccgagattgggccactgcacgccagcctgggtgacagagtgagactccgtctcaaaaaaaaaaaaaagaaaacagaacaaaacaaaaaatgaggaagatgtttatttagtgaaatagaaagatatccaagatatgttgctaataaaaacaaaaaaaaacacatggcacaaataaggtgcatgttactatctgggtcttttaaaaaggggtgtggaagaatgtgtgtgtgtgttttcttcaatatgtgtagaatatctctggaaggaaatttaaaaactggcgacctcagctgtctccagagagggaaaattggtgggttgcaggcagaggtgaaagattttcccactatgactttgaaaatatcttttcaagtttaaagcaccaactgcattatatatcaagagtaaataaaatacaattttaaaatgaaatggcatttgtaaaacacttgatagatgttcagttaacagccatcaggatttattagtaattgtggtttttgccattaaaagtaattttaaaagtaatggttttgccattagttttaatgacaaaaaccacaattagttttgcaccaaccaaataccttacgcttctggtgagggctcagaagagagatcataagtaaagaacactagaaaggatgtttaatattatttccctttttaaaactggtggttgtcaaagcagtctgaaggaaaagtctccagaactggtgatcatgttcacatagcagtagtttggagtcaacagaaatcatcttcaccatcaacctagctccgaaagaggccgagccaatctagttcccttggccaaccaccttcctcccaacctatacgttggggtgatccactacaaagctctcaagagtatacacaatgctactacagtcattgtgagtgagatctgaagggagcataggctaggactcatgagattatagttcagagtttctactgtaattcctttcagcaaagtgaagagcatgtcactggggttacaagtgttactggctacttagctagtgctagattacccaaaaaagtaaccgggtctcatgggcagaggtgggaaagtctgttaagcacatagtgaaggatgaatctgggctgattggaaaacatttgtttgaatgaatgtagcatttatttccaagaataagcatgtccagactgattgagcaagagttatatttagttcagtcgttctgatgtccattttgagaaagctaaaccagcatgccagaaggggtcaaagatcacattttgcatgaaagaaaagccaatggaaatgggactgttagacttaaacttttgggtattttacactaggacttagaaaggactttattcctttttatattttctgtctctagcattgcaagtagcaacagagtgaatttttggtatttggaatactctctcctcatttttcctttgggaaaatcattagcctatttgatttgactgctgttgaatatgttccatgacatccataagtctaccttcaggcattgcttgtgcttgtttattacatatgattaattgcttacataagaacaatgatgatccctgcagggggaggagggatgtgaagaacaacttacttaggcattccaggggctaacaagggatggtttgatacagctcattcttgttttgaatcttcatgcctcttgagaaagaaaggagcagaatatgctttgcatggcgctatgtcctcccaggtcctatgttttcttttttgtattttatcagttctctacgtaaggattttctcagtttaatataatttccatttttaaaattcaaatacctacatatgaggtgggaaaggaaattaatcagatgcattcctataaactgcagacttaaattaagaccttgagcaaactggcattttgatgacttgaggattcagtgggtgggacagttgtacatcttgaactctgggtacactgccgaaagcgaggcctgagaaggctgtgttgaggaaggagtgtcagtgactgagcctgttggaaagggaggctgagagagatgaggacacatacgtaagggagaacacattggctggccaggtgtttttttttctgctgtggattttgattagaattctgggtctcattaagtgacccatgttgaatagagattggatagggctggcttggaaagccctcagtgaagagatgaactcgacagcatgataaggaagtagatgcaaattcaggacaggaaatggagaagggcagggtgagaaaagggaacaaatttacaatttgtgccattagccatttattagaatttggtataagaatttgtggaattattgtttccttctggatttatggtacaaaaacctactgacaagtgtcactaaaagtgatgtctttattcaattatcaaccaaaagttttacactaaattcttttgagtctttgaatgtttatgttatttccaataatctttccagttcttttaaaaggctgatttttaggaaggctagcactttttgatcacagaatagtttccccaatgagtatgatagcttcaatatctttcaaattagattcttttggaaattgaactgtgtcaaatcaaataaaacaagtagggttttttgctgttattgttgaaggtattatatttgcaagtttgtacaatttagcagatataggaaaggtctaatttttttctttagctagaatgttcagttcaaattatacagatataagcatgagacctaaatgaactctcttctgatgagtaatgaatggaaggtagattactcatttcttcatgttcaaaaaacaaattatgtctctgaacacagttgtttcaatgtttttaacttatgttctcaagctcttcccatttctttatcagtgatttgggaatgtgaaggcagtcttgttgtagtttccaaagatttaggcatttttgagactctaagaatagttcattaagccaccaattagtcccttaattttatttaagctgagcaagcaaggcccacactaaaagtcagaagaatgcggcatctacccagagaggctgagggtgggatagaaagaaggaggcactccaagtttggagacacagattctattccagttcctcaagctgcatgaccttcagcaagtctcctgtgttgttcaggaccccagtttctttataagtgcaatgaagagtttggactcaacaacttataaagaaacattcattctaattgtctattgtgtgaaaagaatgtgagttgttctagaaaatatgaatctgctccccaattgtcctccaagctctggttctaaatttcagttattatagttacttctttcgaggtaaatcattgaggaagtcagttaatgcagagatgatgtctggaaggagtttacaagttcattgttcaaatagtatttgttgggggccaactacaactacacatcagggattgtgctcacattggactagtgtctttggaaaacagagtccttgtgtgccctttttgaatttacaggccaacttggggaagcagagagacaaataggaaatccaacagcatgataagtagtataatgagaatgtttagggagatacgagcatttataggagtagcactcaacaggaaatcaaggaaggcttcctggtggctatgatgtctcaagggagacttgaagcatgagtaggagtatgtcagatgaaaagggatgggaggaagatttcaggtagggtaatttgcatacgtgaatatttagacccagagaaagtccagagggactgaggaacttaaaagaaatccagtatgggaggagcatagtacctgttggggagggtggggactcttgataaatgaggatagtaattcaagttctttggctcttgagttacttttggacaagttgagcttcaagtagctagtacataggaggagcttaataaatatttattgaatgaatgaacatgtaagtaaaaatgtctaataggtacctggcaaagtggacttcctagtcaggaaagagaggttggttggagatttctattttgaaattttcaatgtatatatgaaagtaaaaacacaaggagtggttgtgatcatccaggagaaggtatgcagaggagggaagagggtctaggggctgaatcctggggtacccacacctgagaggagggagaggaagaggggctctcagaagagcctgagcaggaagggccattgtaataggactaaacactaagcccctgaagtcagctctctgggggcagaggtttttgttctgtttattttgggatgcctgctgttgaccagattatgctcccctacccacccaaattcacatattgaagccctaacactcaatgtgactgtatctggagatagggtctttgggaggtaattatggttaaatgatgttttaaggctgggaccctactctgataggactgtggccttataaaaagagctctctctttttctgtcctcctccttctacctcctccaggacccaccccaaccccacactgagaaaataaatcgctgttgtttaaatcacccagtctatggtattttgttacagtagcctgagctgaccaaaacagttctccgcacttagaaatggtcctggtaaatacagctaatcaatatttttttgagtgaattgaatgaatgagtcattcactggcatgcttataaatgcattactccctccacagtgtgattgtcattgagcaggttgggagaagggaggagctctcgcaaacatggaagtcctgggtgcttagggagaatgggaaggtgccgtggtcacaaaatcggaagaaagagctgaaaggctgaaaggctgaaaatgctaaactgctcaaatctcctctgtctttttttaaaaaaaatcatttggctaggctggctctgaaattggggatggttcttggttgattatgtggtgtgtgtgtgtgtgtgtgtgtgtgtgtgtaaaggcccttcttaacattagataggactatctgaatctaagtgaatttaggcacaatctagatattgctcttcatagagaaataatactctaagctggcaatgaaattcctcaagtaaacaacagataaagggaaggagagggacacagtgtaacaataattggaataattggaattcttgtatcactcatggcacttacagtgaaagtactttctacattgtcttctattacatgcaacataggtacattatataaaaagatcctaaaatattgttaaaagaaattttcccagaaaatgtaagataaaagttactaaattctattaagcttgcaagttaaatccaaatcattcattgactcataatcaagaacagtcatgctgcctgacaaccaaaaaattcaaactgtcttcatcaagtcctgggtgggaagccaggaaatgggatctgagatcacaggctttgtgagagtcagggtctttggcgtgattcttggtcacaaatcatgcatttttttccttggagagatagtgggaaagaaaaggctgtttaaaaacatgttaaagaatactgattccatttgacttcttgttaatgtgtacccttgcagacttgggtaaaacttgatcatgttaaaagccattgtacttaaagattcatgactagagtgttaggacaattctgtggccttgggggtcccattgcagcaagaagagtctgactgagaagaggatagctccgtcctttgatgcctagtaacctgcatgcccagcactttgctggctgggccattggtaggaaatgcggtacatgcacttcaatctgtaagagatcatggtccatagagatcatagatttattttgccacctggcccagatggtgatagaagtcaggacaatggttgcctagaggggttgggagtttattagaatgggacacaaagggaaatttctggggtgatggaaatactctatactttcattgggatgattgttacatggacatatccatctgtcaaattcatcaaatggtatgctttagatacatgtatttcattgtatataaattttgcctcaagaaacaaaaactcaaggtcaggtgaaaaaagtccaggagctaatcaaaaacccttaaaataagtgaccaaactatttgtgaaaatgagcagaaacttaaagggaaattctttgttatttttccacattagaggaaaattgatggtatcagataaatgctcaaaaataagcttccaaacagagcatttataatcagtacaataataagtttgaacacagacaaaccttcatgtctcagagtgaaggaaccatttctagtagtataagctattacggagatagttccacatttattttctttcatgtttcttttggaggaataatgtttttgtaaatgtaaaatgcttttaatggagctagagaagaagctatgtttggtcatagtattatctgcttgcgaactaaaaattcagagctctcttgtgaatcatgctgccaagaattgcagacttaagcctcaagattgtacgaatttaaattttgactttatggcctcagttggcatgaagatacaaagataatcttctagcaaaaacagttttgaaagaccgggcgtgatggctcatgcctataatcccagcactttgggaggttgaggcgggtggatcacctgtggtcaggagttcaggaccagcctggccaacatggtgaaatcctgtctcaactaaacatacaaaaaaattagctgggtgtggtggcggacacctgtaatcccagctacttagggaggctgaggcaggagaatcgcttgaacccaggaggcagaggttgcagtgagccgagatcacaccagtgtactccagcctgggtgacaaaagtgaaactctgtctcaaaaaaaaaaaaaaatggtagaatgtcacatggaaagttaacttttagagatagtaatccagacacctataatattacattgtccttttaagtatctatatcaataaattaaccaacatttgttgacttaacatggccagggacagtgctgggttctcataattcccaagtaattctagccagaccttgtcctcaaggagcttatgagcagcatgaggagataaaaaacagataaataactctaattcaggaagaatttgataaatgcatgataactactactagaattcagaggagaggaaattttctttgaatagagactaaaggaaggaataatgaatgtggtagcatttgggctggacctattacaagaggcatgctttcccctgacaagccaagaaagtggggatttaaggtagaagaaaagaaaagccttgagttcttggagtattaaaattttgcttggctgaagcataggttacagtcggaggagatggactaggaaggatcgttatgggcagagaggaagccctgaactcatgggggaagctatgatttgggttaaagacagagctgggtcatgtcaagatggatcctgaagcagtaaaaaaaaatccaagaaagtaaacaggttgcagggtttaggatgaagtccgggaggaaagggcagagtggtccttaggaggccgttaggacaggtaaggtaatgggtctcaaagggagtggccgaaatgcaatggaaaaagagagattgtaaagctagaaggcttaggaattgcctcttgattaggtgtggaaggcaagggaaaatcagccctcgaagaagacagtgagattttaatctgggtggctggagagacagtgatgctgggcacagacacggggaagttgagaggaacaccatgtttgagaatggtgactcatatttgaacaagcctgcaatgcccagcagaccgctggaaaagtggggctggagacacattcaacggaggagccagatcaatctttacccttcttcacctgagagagccagtaagtcacggctggaacgtgtgtgtccagcaggagagggtagggagggaagccaagagagctgggagcccgagtgaagtttttgccaaaggcagaagaggaaagtcggcgtagcacagtatactttcccacccatgctcaccaagcccagggacaaggctcaccaagatgagtttggaagagaatgctggagagaaagtggttaagaaaactgcctttactgaacttcttgggctaactttgattgtaagtctctgaacaatcaaagcctgtgaggagacagctaaccttcttattcttcctatgtcaatagtgaacaattgcagatcccctttcctttccttctcctttcccctgttcctctctcctccctccctgaatactcttgcttttttctgggactggtctagagcatgggtggccattgttgacctacaggaggcaccactgtcaccaacaaagggtaacagtctttcttttcaatatttatttatatccagtatttattttcaatactgactatggagagagctctcctgtgctcaaacactgcaatactgggggtctttcaaagcacaaaaacatatatttgcatgatggcatcattaacatttttatggctttctatttcttttttgtactggtctcaagagccactcataaatctctcagtaactgcatagtgtcccagggccagagaccggccactcctggcattgtgattagagtcatttaatatccaaggtggtgactaatgtctggcaacaaagcctccattgggtgtcatgtgtcctgggaccctgagcgtgggcactctaggagcacctcagtattgcgtgttagtactatggccgagagaatagttgagaaagtggtcaagaggtggatccatgtgaacgccactgggaaatgagagacctcgttcccaatcacggtcagtgcaactcgaaagcctaaaatcagtttaaaacaaaggtatctacctttatcttatgttcatatcctaggcttttaataatacgtatttttcacatgtttacagaaagcagtcaactgagctattcatggaaaggtttgtgggtttggttaacgaagtggaggagtattacatttcagctggaaacacatccctagaatgccaaaacatttattccaaagtctggtttcctggtgcaatcggaggcatggcaatgcctctgttcagagactgggggctagggccagtaaggcatttgatccacatgtatcccagaaggcttttattgttaaattatattctttcggaaaaaccacccatgtcctattttgtaaacttgatatccatacacttttgactggcattctattttagccgtaagactatgattcacagcaagcctgtttttcctcttgcttggggtggcagcagaaagcatagggtactttccagcctccaagggtaggggcaaaggggctggggtttctcctccccagtacagctttctctggctgtgccacactgctccctgtgagcagacagcaagtctcccctcactccccactgccattcatccagcgctgtgcagtagcccagctgcgtgtctgccgggaggggctgccaagtgccctgcctactggctgcttcccgaatccctgccattccacgcacaaacacatccacacactctctctgcctagttcacacactgagccactcgcacatgcgagcacattccttccttccttctcactctctcggcccttgacttctacaagcccatggaacatttctggaaagacgttcttgatccagcagggtaggcttgttttgatttctctctctgtagctttagcattttgagaaagcaacttacctttctggctagtgtctgtatcctagcagggagatgaggattgctgttctccatgggggtatgtgtgtgtctcctttttctttcaggacttgtaggattctttgtgccatttgcatataatttggcaggttcacattttttaagagccctatgaagtgctttttgcatgtgttttaaaaaggcatttgaaaattgaaagtgtgatttatggaaattaaatcatctgtaaaaaattgctttggaaagtaatgattgctggccataaagggaaatatctgcgatgcacctaatgtgtttttaaccctttatttgctgacaatctatagtcattaatgctaaactcgattttggcttcagctacatttgcatattgtccaacaatggtctatttttgtaagaattagataaaatgtatacttgatataaaatagtcaaaaatgtaactcttagtaacagtaagcttggcatttagatagaccatgaacacttcgtcagatactctgttgggtgtttgggatagcaattaaaacaaagtattgatagttgtatcagagtctattaggctgcagcaaaggaagtttattcaaaagtataaactatccaagattatagacgcatgatatacttcacctattttttgtctccttaatatgtatatatatatatatatatatatatatacacatatatgtgtgtgtgtatgtgcgtgtgcatgtttaacttttaattcagttaaaaacttttttctatttgtttttcatctggatatttgattctgcatatcctagcccaagtgaaccgagaagatcgagttgtaggactaaaggatagacatgcagaaatgcattttaaaaatctgttagctggaccagaccgacaatgtaacataattgccaaagctttggttcgtgacctgaggttatgtttggtatgaaaaggtcacattttatattcagttttctgaagttttggttgcataaccaacctgtggaaggcatgaacacccatgtgcgccctaaccaaaggtttttctgaatcatccttcacatgagaattcctaatgggaccaagtacagtactgtggtccaacataaacacacaagtcaggctgagagaatctcagaaggttgtggaagggtctatctactttgggagcattttgcagaggaagaaactgaggtcctggcaggttgcattctcctgatggcaaaatgcagctcttcctatatgtataccctgaatctccgcccccttcccctcagatgccccctgtcagttcccccagctgctaaatatagctgtctgtggctggctgcgtatgcaaccgcacaccccattctatctgccctatctcggttacagtgtagtcctccccagggtcatcctatgtacacactacgtatttctagccaacgaggagggggaatcaaacagaaagagagacaaacagagatatatcggagtctggcacggggcacataaggcagcacattagagaaagccggcccctggatccgtctttcgcgtttattttaagcccagtcttccctgggccacctttagcagatcctcgtgcgcccccgccccctggccgtgaaactcagcctctatccagcagcgacgacaagtaaagtaaagttcagggaagctgctctttgggatcgctccaaatcgagttgtgcctggagtgatgtttaagccaatgtcagggcaaggcaacagtccctggccgtcctccagcacctttgtaatgcatatgagctcgggagaccagtacttaaagttggaggcccgggagcccaggagctggcggagggcgttcgtcctgggactgcacttgctcccgtcgggtcgcccggcttcaccggacccgcaggctcccggggcagggccggggccagagctcgcgtgtcggcgggacatgcgctgcgtcgcctctaacctcgggctgtgctctttttccaggtggcccgccggtttctgagccttctgccctgcggggacacggtctgcaccctgcccgcggccacggaccatgaccatgaccctccacaccaaagcatctgggatggccctactgcatcagatccaagggaacgagctggagcccctgaaccgtccgcagctcaagatccccctggagcggcccctgggcgaggtgtacctggacagcagcaagcccgccgtgtacaactaccccgagggcgccgcctacgagttcaacgccgcggccgccgccaacgcgcaggtctacggtcagaccggcctcccctacggccccgggtctgaggctgcggcgttcggctccaacggcctggggggtttccccccactcaacagcgtgtctccgagcccgctgatgctactgcacccgccgccgcagctgtcgcctttcctgcagccccacggccagcaggtgccctactacctggagaacgagcccagcggctacacggtgcgcgaggccggcccgccggcattctacaggtacccgcgcccgcgccgcccgtcggggtggccgccgcgcccggcaggagggagggagggagggagggagaagggagagcctagggagctgcgggagccgcgggacgcgcgacccgagggtgcgcgcagggagcccggggcgcgcggcccagcccgggggttctgcgtgcagcccgcgctgcgttcagagtcaagttctctcgccgggcagctgaaaaaaacgtactctccacccacttaccgtccgtgcgagaggcagacccgaaagcccgggcttcctaacaaaacacacgttggaaaaccagacaaagcagcagttatttgtgggggaaaacacctccaggcaaataaacacggggcgctttgagtcacttgggaaggtctcgctcttggcatttaaagttgggggtgtttggagttagcagagctcagcagagttttatttatccttttaatgtttttgtttaatgtgctccccaaatttcctttcatctagactatttgattggaaatatgtcagctatgatgatgactttctgggaagcgattcctgtcacccgctttcccctcctccccaccccacgtcctggggctttagagagcgattgggagttgaatgggtctgatttcggagttagctggctgagtccgcgctggagcggattgctggcatgtgacttctgacagccggaaatttgtaggtgtcccgcgagtttaaaacaagccatatggaagcacaagtgcttaaaaataatctcctgccagcccagtgacaagcctgtcccacccggggagaatgccccggagtggcgtgcgggtcagccagggtctgcgcctcgcagccactgtggaaggagcgcggccggtccaggacacaggagaccactttgtgacttcaatggcgaaggttgtgtgtcctcattttaatttttttccctacaagaattgttctttctccctctcctctccctcccattttctcttgcccagtttctccttttgttttttgttttttgttttcctgatgggcctgcagagggattaggtgggcgcttctggtgaacaccttcctaggtggccacaggacaggtgtaccccggactgggtttggaagcttcagggcgccacatggctgggtcctgaattaggcatttcccaactgtacactggtatccggactggtgtccctatatctttctgccttgtaagccgtggaccagtttttgttcagtattctgtttccagggatatttatagcagaaggaaggggactaaagtgcagtttggccccagaggatactgaagggcagattctgggggtattcagtgtgcatcttcagccgccttggagaaatttagagcatcccacagccacgcagatccaagctgtctttactcaaaagacaaacaatgaacaaaacttttaaaggttggcatatttcaaattaattttacttgttttaatttagggttaaaacagagaaaaaggatttcttctgcccacctttttttttttaaatggaagaacaaagtacagcgattaagtctaattccacacaacatttaaaactgcttgatgtgaaggaaggcactggtatgatgtgaattccataaccttatgatggactccagaaaccattttcttccctatttaattttcagttcttttattgcaaattaatgctgctgaatttcaatgggcactaatgagactgctccttggtagattatttactgccttgctaataattacaaagtgaacctggtcaaatacagaggggatcgcatcttattcaaaattgttcatcatcccagtgataagtggtatcagtgtaatatgccctatcttacactttctgcattacatgatattcaaacactcttagaataataaaaaaagagacaaggaacttaaaaattaaaaaaaaaacttgcacaaatgggactctgtgtggaaattcagttttagaatgatttttcctgtgttttatttcccggattatctttcctcttttgttagaattctgcctgttattatccagcaaggaaaagaagcatctatgcaagttcttcatatggacagatattatttagtatttttcccctctcagtttttctgcttaaatgactctgggtataaaggaaaggattgattgggctcttttaggaaactttaagtttcttaagtagttctcaaaagttttggggctgaaagcagtgttttcaaactgcttgtcatgacccagagggtcatgaactcagtttagtgagtctagaatattttttaaaaggactaaaatggaaaggaatataatagaaaatatcagagtgcatggtatttcgtaaggataagttttgtttcctgaaaatctgttttaattatatgtgcttctgtgtgctgattgtgatgtaaaatgtatttcttactgtggattgaattcaaagaaaaaattagaaagctaatggcctaaaatattatatgttcagtagaaaacaaaaaattcaggcaagtggctggttgtttttacctatacaaatcaaaaggctattttgattgtcttcattttccccttataaattaggttggtgtctttagtcatttaggctaagttttactatctgattcttaacttttctattgtagaatggtgctgtcatgtggactgtcctcccgagtgtcccactggatgttcagagaatttatgtgaaggtcacgtcatttagcattgagatgctgtggttaccttcttccatttcttccataatatgcagccacatctatgtgtgaagaaatgtaatagataaaatttctctggacgcataataatgtgagaaagattgtcacatgtcccagcaaattgttattaatataaatttgttacttggcaagctgagattttgcaagatgttactcaaaatttcacaatgaaggaaacagggagtcatcttatcctgggttccttttttagatttcaaacaacttaggaactttgaataaaactaaagatgaagcttaactatatcaactatcctttttaaagttctaattaggaatttaatgctgcatgcttatttcagttttattactcagtattcttaaaagttagacgtctctcacttctccaaaaaacttggcaaatgtataaatcttttgcatcaaaatcaatgccctgctaatttgtatcctggccatctgcatattttggacaactaatttttccactggtgatcatttgaaactctttctcaactttgaatagagactgatttccaaagtgagatttaagtgactaagtttcaagtttccgatacatttttccttttacttagataacatttcagcccccttcctttctgatcttacttttttattaatttaaattgttactgattacgtgacactttgtgctggtctaagaatagtccagagtcacatattccctggtgaatgagcatattttcggatgaaaacggaatcacatcttcaatccccatttcattttcacctcctccatgtggcttgtacctgtttggaagaaagctcctgaaggataattgccacttattctaatctttctcacactcatttaatttggatccctggctaaagttgttatttacttttgtgattatacttagtctatgacattcataatttgggaaaattctcaggtttgagaattttggcggcttgggatttcttttagtttcttatagttttaaggatatgtaagacaggtgtaagaaactgccaaggggaggaaccatagatatcaggaaaaactagaaaagatgccagacttaccattaatgaatgatgagacaatagtaactttgttaagtgagattgtatatgtgaaagtggtatagaaactaaacaaacattaggtgtttttattattttactcacatgttaatatttgttttggtgctttcataggctaaaaagctgggaaataacagatttaagtggtcaggaattttgttataaatatagaatgatgattatatgaaatcttttcctgtgaaagtcaaatttaagtaaaatctttatcaccatctgcaacatttgtctgcagcctggcttaccaggttatcataaagaacatttattttacagatacattaaagaaagtcaaaaccctgattatgtgtaaacaattttacataaggaaatatatgaattttaattatatttttctaaaatccgtactcagcatgaaattaatacatcttaacccctccctgtgacttcattattatttttaatgtaactttagaagaacccagtagagagagcagcgtgctaagtgtgtttctttcttttccagacaactttgaatggagaggagcaaattagtcttttggtttaattctgtctcagtttgcttatctaaagaaaggaaaacagagtggctacacttgtttagaaccatatgcatactccagagaaagatgctctattaatccaaaaaatacagccacttgaaaccagccaaagcgaaagtgtaagggacttcatggaaaggaggcagttcaccaaagttattgaggggttttatattttaaactccgccagtgaattgacgtgtaatgtcacttacaaaaaaaaaaaaagtatgtctgagctgttcgctacttcgtctctaaaatatactcatactgatctctgaaatcccagaatttaagtgggctggaggttacgggaagcacctttataatatccttaatctcatgagggaagaaaccataattgctgaattctctgccttggataatatcaggagggactctgaagaaagttttgcagtaatcaacaatgttttaaattatgtgtatatttttagatcacctcaaaaaatataggaagcacagaatgacaactattctggtctcaactgacacaattttatgtagtttaataaagtaataatttcaagaaacgtgggcaaataagaaagagtatgactttcttacaacccgcttgtaagtgatgtggtggtggtaatgatccatgattttgatgatgacgatgatgatgaaaatgaagtttttgtctcagtttgggtaggtggtatttctggatgcctcctatggaccctggagatgttcatcctatacagaaatccaatcctttaaatctacttggctcattgttttagaattctaattccatagtctgaaaattttaataatgatattaccaataatattagaaacttattaagtacctataattgctatacaaaaaatttaaaagaacccaaaattccaagcaagactgaaaattttttgtctctcctctgaactatttagagggacaaattagtttgttcttataatatctactttaaataaatgtgccatctttaataagatagtagacttctttgtttggtaatgttctattttttggagatcctatgagttacacttgggaaaattataaaagttcacttaaagttaataaaatccattaagtaatgttcagaactagacatttccaaatgagcccttgaaaagctcaggtgggttctttttgagagttccccaaatgttgtcaaccccaggaggaatggaagacctctgcagttttgttattcagattctcatctccttctcagaagccgtagaactggccgggccctaaggtccacgctccttggttccagttctgtcttccatccttcggtcccgggctcattctgcctgttcctaaacggtggcaagttaggggccccagcagccaacttgtgcttacctggcactacttcctgggcagttttcttggctccttgacttgttgggcggcttgggatttcttttatggccctgaaagcaaaagacaatgttctcttttagtttcctgcaattaaatgatgttagaaatagtcatcttcacattggcgtacttcctctttcttctgtaggtcttttagaattttgagtccattctcatattttcttgtttcatttgctttattttctaatacatagaagtttaaactccctttaaagagtttttggcctcttttaccctattaagctttcttttttcttttctgttttagttgttccatctgtgtattctcagatatttttctttcaccttttctggtttatttctttattgacctgtctcatctgttattttaatgaaatttggaacagggctaaacagagttcctacctcagccagtataagaatataccgtaataactcagagtggtattaactagattaaaagtttcaaaaagtgatgtttttcttgtctctgaggatagaaacttcaacaaaataaagaagaaattttcaattagtagaatttctttgaaagtttgttcattcattcatttggctaccttattccaaattgagtcattcattgagggcttagactatataaagtgtggttttgttttcccagcagttcatgcaacagcattgcacctagcagctgggaagtcttatagcatgaataggtgagattctaataccagaatctcctgcatgtgtaaactaacagtgtagtcttgactgttgtctcccagtaaacttggtttcaggagttttagatccatgtgaacgtgtacaaggcatttttgctaactgtaacttcccacttaatcaacaaaaacaaaaacactcatttctgaacattcagtgcattcatgattaatcttaattacaccacaaaggtatttttcaatggtgattttgcgggagtggggtaacagtttcgaaagcaacattgtcagaaacatagttgattttaaaggttctttctggtgactttgacttctgcttttttagaagaccttacacagagttgtatttatttctcctggaatatttcaagcaattcagagtgaaagggtatacattccaatttgcgtatgagataaaatttagttacattgagaagctattttctttagttacagggaaaaaattgtagggcttttggaagcctctttgatttctaataggaggaatccctgagcactggtccaaacagaaatcatctcttcttcattgctgtatttccctcaagctcttagcaaagtgcatggcacgtgaaagcccggagaagctgttggttgaaagaatggatggtggtgggcaggaagcatcagggacatggtttgcttcagtctattggctgggagaaaggccatttaggaagggatccttagatgccactggaagaatgtgggaagtttgtgaatctctctttctcaggaacaaaagtagaaaaaggactccacacagcattccaagtacagtcggccctcattattcatggattctgtatttgcaaattcgctgacttactgacgtttatttgtaaccttcgagtcaacactcacggtgctttctcagtcctttgcagacgtgtggaatggcaaaaaaatttgagttatatgacgtatatgttcccagctgaggctgagcaaggctcacttctccttgcagccctcagactataaacaagtgtccctcttgctatctacttcgtgttatgatttttgcattttcataatccctgttgatgattttgctgtttaaaatggcccctaagcatggtcctgaagtactgtctagggattctaagacaaggctctgacgtgtcttaagagaaaatacgtgtttgataagctttattcaggcatgagttacaatgctgttggccatgagttcaatgatggtgaatcaacaggatatattaaatacagtgtttttgaacagaaaaacatataaaacaaggttatgtattaatgagttggcaaaaatgctgtgaccaaaggctcccaggaacctaccctattttcccctcaatgcaatggttcagtatttgctaattcagtgtttgaggtgactttatagaacatgagtaccatgaataatgagaatcgattctgtataatagagtgatgaaagcacaggtctgggagccagcagctatatttctattctggcgtgactcctgtgtagttgtcatcactggcaaattgcttaactgtgtgcctcagtttcctaatctgtaaaagctacatcgtttggatgatgtgaggattaaacaaattcatagatgtctagggcttataacattcctggcacataacaagtcattattttttattactacttcggaagggaattgagtactataccctgaagaaggtgagtatgggaattctctacgggtctggaatgtccctatatttgtttattttgccttcaagtgactaactttaataccctattgtgattagaagttaaacttctgcaaccaaaaggaagcaggaagctagtatttcttgaagtgcttattacatgccaggtactgtgctacaaaaacaaaacaaaacaactgtaaaaaaaacttcaaatttggctgcgtgcagctgctcatgcctgtcatcccagcactttgaggaactgaagggaggattgcttgagtccaggagttccagaccagcctgggcaacacagtgagaccctgtctctacaaaaaaacaaaaacaaaaacaaaggcactccaaatcagtaaaaattaatcaatcaataaaaagagtgaggggcattaagtattgtggactgaagcaatcccagagagggaattaattgaagctgaggtaagcagcttatggagaagctatgatgtacagagggcaaggaaggaatttttctgtaatttggaaaaatgggaactgtgagaaagaaggagttggaagctcatacttagggagcatctacaaggacgtctttttcacgttggttggaatatccaaatcaaggattatttcagaatcacccagatgattaaaaaactactgagatccaggttgtatttcagcagttctgacaattgctctgggtcgaagcttgaatcagtagttaagaaaaacaacaaacaaaacaaattttggggcttttctcactgatttacagttaaagctcatttactcttcctatgactttagatggaggatatttccaagtcttcaggatggagacatggagggaagtgagactagtgatgtgcctcaaggttttgctgttgttctaaccatgaggagcactattcaaacccaggtctgctagatttccaagtcttcatttccttgggcctcttggatttcagaagcagagggtaaaaggagtgctggggagaaagatcacagtagctttcaattctactcctcagctttccaaaataagtttcaagactggccgttgcatttgatatggaataaatacaaagaaggtagattgaagggtatgaagatgcagatttttgataccagatatgaagataacattaggaagcaatctaaaacatggacacaaacacacacctgtgccagttagcctgtataattcgatttttgttaagtgtttagataactgaaggtaatttaagccctcatatcttcccttcatagggttctttttccctctggttcatcagagagttgccaccaattcaggctgttagtggtacacataacctctagcattgttgatacagctataaaatcccaaatatcagtacaattgttgattgcataaaatttccagttgcatggttggaaagtcctgtaagtttgaatccttaaaccagtcttaaatgtggaggaggactcaattaaagctctcctcgtgtcctccctctgacgtatttgcaaaatcctttccacaaatagaatactgtttttaatgcttccccagtccaattttgcgttgtagaagacgaatttatggatgagggaagtggcattcaggcactccagcttggtatagaagcccatggtgtctggtcctcagtcctcaagcccgctcatttcctcatgtgaactcagaataagcagctgaaagcaagtcttcaaaatctcagagatatgtataaatgcaagtgtttgggtgagaagtgaacatgggtctcctctagtgcccacactacttgactaacaggttttgggctccacacaatgagggattatcaacccctgtcccagggctctctgggtcttggttctttgtttttgatgctcagcaattgtgatcagtgaaaccaatgttgcttttctatcaagagtccaacccttttctaagaagggttgtgtttgatattagggaatagctagcaaagttatcaagtaacttgtagaaacattcttttgcaagagttcttatactgaatgactgtagttgacagcagtgcagtactggtcattttctaggacatcttaaaaacactgatgagaagtttcctctcagatgtctgtcatgtcattcttgcctttctctacacagggtcagttttctcttattgctgttaggagttcctcattggtttttcagcttttgggctttcaaactctaattaatcataagctactagagtgtactacctaaagtgtgtatatacacatatatacacacacacacacacatatatatacctggtatacatatatatatataatatacatatatcatatatactccccaacctgatctggttcttcctctgcataaaagacctcaggccagtcagagaaaacatgtatgttccatggtgtggcaatcaagcccttgtatttggttccaatcagtctcctaactattactccaagaagctcttgttgaaagagccatgtttaaatggcatgttcctactttcttcttcatagtgatcttcatctgtaccatgtacccttctttcttcttgttccatctctgttaggctgattctacccagaagtcaaggttcagctcaaatgctatccctatcaggtgaattttccacctggcatttgttcggtgtgcattgtgtgcatacagcaccttttcccggtacctttactgtaatcaccagataattcctttcattttagttgtaaatagagttgtcttccccctctatggaatagattttattaatgtatagagcagcagtccccagcctctggaccatggactcgtactggtttggggcctgttaggaactgggccgcacagcaggaggtgagcagtgggcatgcaagtgatgcttcatctgtatttacagctgctccccatcgcttgcattatgcctgagctccgcctcctgtcagatcagcggtagcattagattttcataggaatgcaaaccctactgtgaactgtgtatgtgagggatctgggttcttcttatgagaatctaattcctgatgatctgtcattgtgtcccatcacccccagatgggactgtctagttgcaggaaaacaagttcagggctctcactgaatctacattatggtgagttgcataattatttcattatatgttacagtataatactaatagaaataaagtgcgcaataaatgtgatgcactggaatcatcccaaaaccatccccagttccatctgtggaaaaattgtcttccatgaaaccggtcatggaactggtgccaaaaatgttggggaccactcttataaggcatattagagtaatttcatagatttcctaattcatttatcatattcattcactcagcaagcattactggatgttgatcatgtactggctttggtggtaggtgcagagattgggaacattgtcatcaaggagtttatggttgagtgagggagatgacaagtggatagacaatgaaaaaacagtagaataagaactgtgatagaaaagagacagccaggagcattgaggagaggcacttaaccagatggaggatcttggtccattgatatggaggtcaaaatggtttaatagagcaagtgaccctttcaactgaattttttaagaatgaggatttagccagacaaagaagggcaggtgaggttgtgaagaggaactgagtggtactcttcagagctccagcccagttccttggacagaataaatgcttactaacttatagagctgaatattgaattaataaaataagggtaaactgttaagaatcagagaaataacttaaagaacactgatagctagtgttttttgaacaccatgtacccaggtgccttgccgaaaaccttaatgatcatcttgtttaaaccttacatttctcataagaggctggtactattgttattctcattttatgggacgtagaaactaagacttggagaggggaagtgacttgcccaaggtcatacaaccagtactggagaattagggattctagatctagaatttggactctggagcttaaggttttaacccacgacattatgcagagaaattgacaggatttttctgttgctgatcaatttacttggcagttagtttgttacttccttgtctttattttagttgtgacaatgctttcatcttagactgtgtcccgaggctgctgcttttatttttatgggaaatggctatttttatgatccttgctaaaagcatgtttaaacaattttccattaagtagggggatgtttttccttctaatatcagaagccaataaatgaaattctacaaagacttgctggtagcaaccttaggaatttctttgcatgtgaaacccatctgagaacttaaaatctgggtaaaattgtagtgtaatttggtgcaatcgtctctttgcacaaataacatcataaaatcatagtattgtcatctaggaggggccttagacatgatggaatcctaccttttatattttccaggtgaagaaatcaaagtctagaaaggtgaaggaacttcccccaaagtttcccagctggtagagacagaaccagggctaggtcctctattctgactcctgaccactacctcacacctaatagatggaggcatgcccagttcctgttcaccgagggcatcagaccatgccatactcattgctactgttccagcatttatagtagaagctcaagcaagcaggatgacagaatacctaattctggtcactacaacattataatgatggctaaagtgaatgccccagccatgcttgtctagacaggccatctgtttaattggtatatggttcacgtgagaatttttaacctctgtttgtcgagtcggtgttagttctctagtgatgaattatttcctatacttccatttagattatttactcttaatttaataaccatacattgtttactttggtattgaagattcccttgtttttcttctttttttctgtttccagggcttaaaggttaggagtgaccttgccagacttccctggagacttacactgtctcctttcagatttctgaagcagttgggtgctatttttagtccactatcaccaatgtgaaaatggaacttgcattatttcattatagatatttcactttagtattgacagaattaaaaaaataatttgatctgtgcttgatctagcagccaggttacaatagacatttttagttacctggtccacatgttgaaaaacatgtgtcttctctgagactaatgactaagcccgatgttggttatatactgtttactattaaattttccccttgtagtttaatattgttccaggaaatgaaatgaaagtttaataagaatggcaattgatggacccatatgtcggaagtataactaatgtccccgttacatgtgttaaagaaaggcatggctggtgggttgtaactgtactacaccaagatgatttgacacaacttattctacagagatatatatttatcaggatagaatttataactaaacaaaactatagcattttttcactttgattttttttaaatgagtcaaagaactgctagaattgtcagttaaaaaattttaaaaggagatatgaaaaaatcttacaattcacaatgctgtaaagagataatgtagggattaatatgttcttgatatcaatattttatgacttttatacatgtagaagcaaaacaatttgaggtaggtgaagttagtatggacttcttgagattgtccttcacatttcttttcctttcggtgaaaaattgaaggccaaaatgtattttcttctggttttgaaaatactgtcaagatccttgcaacaaaatgagttcctctaaggagctgaaaacaaagctcactcccctcgtgatactctgagaggctttgctcagcatcctgcattctggtgattccttggagacagatgatgctaaacacaggaagattaggtcaatggtaactttttctaagtcaatatttcttctccttgggagatgatcattttaaatcttcccgaagtccaggctaaacctttctaattgaatctccatgaaggagagctccagcaggtggagaggaagtgagaaagagaaatgaaagctgcacgcctcatgacgctgtgccagggagttcttaaaggtgagggagtttctttttggtaacctaagctatgtgaatcagaaggttcattagcttgtttctttttcttttttgtaaactcctacataattttagtaaacaggaacagtaacctaatgtgatatcccactggcccaagacttagtgcatcttcaaagttgcttaattatgtccgaaacagacttttgtctcttgatgagaaaagcatggttaaacgtgtgatgatttcctattgtcctgagctcagatctgtaattgtggccagattcatgcatctctgctgccttctcttagaagaatcatatgtaggcttgtcagataaaacaggatgcccaggtaaactggaatttcagttaaataacaaataacattttagcatgtcccatgcaatattatactaaaatattatttgttgtttatctgaaattcaaatttaattgaatgtcctgtatttttgttggttacatctggcagccctagccatgctgcctttctgcttaatgggcttaattttttgaaggctggaggttttctgttatggtgcccgtttccacctgcttttctaccaggaaaggaggcatgctgatgtagaatttgcatccttatttttgtcattattattgattataacagatgacataggtttagattaaacctacaatgacattgctgtcattcagataattgtaattattgctaattgtaaagaaggataattttttttgaaatgactattatttgttttttgtttttgtttttgtttttctttttttctaattatactttaaattctagggtacatgtgcacaatgtgcaggtttgttacatatgtatacatgtgccatgttggtgtgctgcacctattaactcatcctttacattaggtatatctcctaatgctatccctcccccctacccccaccccacgacaggtcccggagtgtgatgttccccaccctgtgtccaactgttctcattgttcaattcccacctatgagtgagaacatgcggtgtttggttttttgtccttgggatagtttgctgagaatgatggtttccagcttcatccatgtccctacaaagaacatgaactcatccttttttatggctgcatagtattccatggtgtatatgtgccacattttcttaatccagtctatcattgatggatgtttgggttggttccaagtctttgttattgtgtatagtgccacaataaacatacatgtgcatgtgtctttatagcagcatgatttataatcctttgggtatatacccagtaatgggatggctgggtcaaatggtatttctagttctagatccctgaggaatcgccacactgacttccacaatggttgaactagtttacagtcccaccaacagtgtaaaagtgttcctgtttctccacatcctctccagcacctgttgtttcctgactttttaatgattgccattctaactggtgtgagatgatatctcattgtggttttgatttgcatttctctgatggccagtgatgatgagcattttttcatgtgtctgttggctgcataaatgtcttcttttcagaagtgtctgttcatatccttcgcccacttgttgatggggttgttgttttttttcttgtaaatttgtttgagttctttgtagattctggatattagccctttatcagatgagtagattgcaaaaattttctcccattttgtaggttgcctgttcactctgacggtagtttcttttgctgtgcagaagctctttcgtttaattagatcccatttgtcaattttggcttttgttgccattgcttttggtgctttggacatgaagtccttgcccatacctatgtcctgaatggtattgcctgggttttcttctagggtttttatggttttaggtctaacatttaagaagaaggatacttaaagtataagggaaaatgttacaatgtatgaagggaacatgaagaaatagaatctggtaaaaaagagttcttgcttttgggaggccaaggcctcctggctaacatgatgaaacctcatctctactaaaaatacaaaaaattagccgggcgtggtggcacacgcctgcagtcccagctgcttgggaggctgaggcaggagaaccacttgaacccaggaggtgtaggttgcagtgagccaagcttgcaccactgcactccaggctgggcaacagagcgagactccatctcaaaaaaaaaaagaaaaaaaagagttcttgctttcaaaactatggattaggtaacttttgtgaatgagtaagatcatgagtattataaaaatagcacctttcttttttgtcttggggaaattatcttattttttaattggatttcagaaaagagtatttcagagaaataaatctctgaaatgctttttgaagtgtgaaagatttagaagacaaaagcaaacctcctgtctagataaacattaaagagatctgccctcccctcctctacctattcaggttgcaacactttgggggtggctgccttggtagagcttgatcgtgactctggtggcttgggagatggcatgctgcacaagggattcatggttacagcgggcttgtgggactggggctctccaatacgtggttgggtttgtaaagaaatcagagctatggtgtgaacaaaaggatatgcatgggagacagtgagacaaggaaatgctccagaaattattggaatataggtcagataactaactgtacttgtgccattttctgggggaaaattctctgaaggctttttgggaaaagaatggaagtgagaattctcaggtcctcaaaatatttccttttactcagtcctaacctgaggccgttaaagaattcccagagtcacgatggaaggcatgtttgggagtaagagccagagtgagggttagaaatgtgttgttggccaggtatggtggatcatgcctgtaatcccagcactttgggaggccaaggcaggtggaccacctgaggtcaggagtttgagaccagcctggccaaaatggagaaacctcgtctctaccaaaaatacaaaaattagccaagtgtggtgacacgtgcctgtaatcgagctcttcgggaggctgagacaggagaatcacttggacccaggaggtggaggttgcagtgagccaagatcatgccactgcactccagcctgggtggcagagcaagactccatctcaaaaaaaaaaaaaaaaaaaaagaaagaaatgtgttttccagggttctgggtacttaggaatttggttgcttttgcaggtggaagtggaggtgactaggtaacagctgagtgattttgccccagttggacatgagccaggttgagcagaaagccctgggatgcggggaggggggtggcggggaaggaattgaaagttggttgtgtggtttggctttggcttcatggcatgctcacaccttgcttcgcatagcatgcttagactacagcaggagcatcaggaagtggatttctgagctcaatacaaaaagttataaataccacctataagggcaataaagatatatagttgattttcttctttgcaaggccaaatcttataggaacataagagcgaatgagttacagcctgggaatttgagccttatattcagagattttaggttgcttctgattccgctgtctagacaaaaccatgagaggatagtgtctagaaatgagaggaagctcttccaatgcagaggctagaatgtgtcagcctgtgctgcgaggcctgggatagatgtttctgaaaagtaaaagggcagctttcctactggatacttgatcctcaggctctagaaaactctgctttattaactttgttgacttcctaggcaccacatgggatccttgttcttcctccttgtaagcagtaattgaaatcagtttggcagcctggtttacagtgaccatggtggcttgtctcccgtgctcttacctcactctgttgatgttgtaaaacctccagctaacttcatggggtggctgacccacgttgctcatttattcattcaacacatattcattgaccatctactctatgccaggtattgttatcagcactgggaatagatcagtgaactattgatctatttgtctaatgggacaaattgacaaattgggaaagattccattacacaggtgacatttaagcaaagtcttgaataagggagggaatagtaccatgagatatcctggtgaaaagcaatttaggctgagggcacagcagggaagaggccctgatgtgggaacatccctggtgtcttgaggtacagaggccagcatggctggcacggagtaagaagttggaggtgccgggcatggtgactcacacctgtaatcccagcactttgggtggctgaggcagatgggtcacctgagcccaggagcttgagaccagcctgggcaacatggtgagaccccatctctacaaaaaaatacaaagaaaattagccagatgtggtagcatgcatctgtagtcccaattgcttgggaggctgagatgggaggatcaaattacttgggaggctgagatgggaggatcacttgagtccaggaggtggaggttgcagtgagctgagatcatgtcagggtgacagagcgagaccctgtctcaaaaaaaaaaaaaaagaaaaagaaaaaagaaaaaaaaagaagttggaggtgagtaaggagaggaacgtgggggacagagtcctcaggactctggcttttactctgagtgagtcgaaaatccaattaaaggtttgaaagagaggaatgacctgatctgacattttattgtgaacgttttcaaatctttacagaagtggaagagcataacgatccttcatgtacacatcgcccagcttcaactatgatgtttcatttgtaaatatttccgtctacacttccaaaggatgatgactatttttaaaagtccaactataataccattatattttaaaagttaaaacactatgtctttaaatatcaagagtttgtattgattcgcactttgaaggtcgagctgatgaaatttcctgaggggttggatgtgacatgagagaggagtcaagtattgcatggtaattaaaaacctttgcagcatagtccatttaccgaaagactatatgtatgcacttcaaagcaggttttaaagattaacatcaagcatctggcttcatgagttttaacttcttttcataaatgttatacaatgtcatcatctctccagctagagaaaatgctattattcttattttcaaatgaggaaaatgacgcagaattatttacatattatgtaacttggtcccaagtcccttagatactggtttagaaaatcctagtaaactggaagtgacttatccaaaattaaaatttattttgctctattgtcttttgttgcctatgggaactttgtgcaggtaactaggcacatgtcaggactgatttactgacctctcaaggtatctttaattattttgggggatatcacggaatgagttctacacaattcatttgaatcgaattgaacttaagaaaattcaaatgatgcattggctgcctcctatttattacatgctgctcataggcataacagcatagtctaacaagtataaaacctgtgtaactgtagctttcagtgcagtgtgatgagggctgagaagatagtggtacaaagaagagaggtagcagagtgaagctgagtcaatatgatgaagatttctctagacttgaaagggctagaaaaggttattcttggcaggaaaaaaacatgagccaaggcataaggataagcacaggcatggcagatttgggaatgtcatgtaatttgttgctgggctgcaaagtacatggaaggggagtgaaggaacagaaggagatgaatctggagggagaggttaaagtgttccagagagcaatatgtaggtgttactctaagtcaaagaggtcgtaatagcatgtccagactccaaaactctaaacaagtcatagaattgctgccttggtagggcatatcacacacatcaacccaatcctctgtcaccatgacatccatataactgcaactctatacatttcccagcctatgttcccagagtctccagatgacattgtctgcaaactgcactgcagaaggctctgctatgtcttcttaaaagtaagcaagactgttttcctttgttacatgagcagcaaaaggatagggtgctctttgacctcacttactgtagggtggataggaaagtcaaggaagagtaacccagaagatttagttttaactttcgcatcaaagaggtcccttagcatctgctcagagatgtcacaatttctggtgtgtgattatgtttaagaattcggccttgccactgttgaagttgttctgtggaaaaagaacctctcttaattttacatgatgcccaacttctcttttattccagaatcactcatatgctgttggactctttccagccatgtgtgctaacctaggcaatgtcataatagatgaattatgtttactttgtctttgatatctcagctcttttatcttctattcaagttcccacctccatcattactgatagtgttcgttgaacaaagaatatgtcagatatacagaagtgtttctccccttttctctgtctctcttttccttcctttcctttagtttcctttctctgtctgttttctgatgcctcattttagaaaagtgattttttttgtgggaaaatcattttagcattagaaacgcaatggctatcactgacagcttcctctgatgaaacggccatttgtcatcattacacggtcatgggagtgctaagaagacttaaatgcagggctaccaccccttcccaattcatcttttatccattttatttctctaaggaaagggtttgaaaaatgggctttgccctcttggatgcagtgaagaaattctagctggctacagatgttattgttggtcggaggcaagggataaaatcatggtcacaccattgtagcgccagatggggaatgtagcaaacatagttgtaatttctcattttacagatgaagaaactgaggtgcagaggggttcggtgacttgtttaaggcatgtaattgttattggcagctttctgttcagaacttaagagtatgagtcagtctagatcttttcatcacaatactctgctcctcttactttttcctgaaatttgtcacattgacagcaatgtgatccctaatgacacacagattcccaaataatttttgtagtaaaaatttccatttgcaattctggacatgtgtgtgtgtggaattttatgtgatgacatattggtcctatcttttgaataggatcataaatgaaatgacttatggatcacattcaaaagcaggccaggggccaatgtgtaagcaggtgggttttcatatttggagttctgtacttttgtgttagtcagtgggtctaggactcttgtagtgtatttcccaagggccaaagtcttctgccttgaggtgtcagctttccaaggcagaggctggatgctttctcttccttctgggctcctttctcttaggcttcccccttctcttctcctccatttgtatctgtcctttttctcggtactttccctggctggtctcagctagatgctcactcaatgctgttgaataaatgaatgaatttcgtagtaattctgcaggtaaatcaagttattgtctcccaatacggtgctatgctttctgaggaaattagactggaagtcaggctttttaaaaaagaagatgtggtgtcaaattgcagctctctctctctctcgacttaccttttttctatcatccatatgccttctttcttgtatctttgggttcccagacctcaccattcattagcacttggaatggattggtaagaataaagaaaggagaggtggtgaaactcagcttgggtcatctggttacacattagtaactgacaaaagataaaaagatacagactaaatgggtttttagggaactttttccagtctattcttgtttcccattagtgtgaaaaatcaacacttgcttgtattttggggtgaagacatttttcttaagtgagtgggaaagcctcttgacattttaccgagagccttaaattttgaatggtgaatgctaatgttctttgtgcataaagaatttcagaacttgtatatatgagcattaatgatgcatcattttctatttgtgagttaaactaggtattatctgtaatcatatttttaggaaacattcaaactttcatcaagtcattctcttatatgactctcagctccattaactctgttttcatggaactcaacagagttcttaacgtttgcattataaattaaattagcatttcccctcaaagaagtattgctgtccttacaataaataattgtagacaatttcttttcttttcttttttttttttttgagacaggttctctctctgtcacccatgctggagtgcagtggcacagtcacagctcactgcagccttgacctcctgggctcaagcaatcttcccacctcaacctcctgagtagctagaattataggtgcacaccagacctggctaatgtttaaattttttgtagagttggggtcttgctatgttgcccaggctggtctctaactcttgggctgaagcattcctcccaccgcagccttccagagcagtgagattacaggtgtgagctaccatgcccagctaattgcaggtgatttctaatgggatttagtatttctgggtttaaggatgagatctgaggtaatgactttgtttccagatgtgaaataatttgctcttgggttgtgagccctttgggtgggctcccaaggatcctgctctcttccaggagcccaggctctggggtcagactgcctgggtccttgactccctgttttctgattgtacaactttggtgagtggcctaattcctctgtgccttggctaccttggttactatttctaaaacaactggtgttgtagtagtactgcttagagtactttcaagggttaaatgaattaatccatgtaaaacgcttaaaatagtgcctgccacaaccatcaatttagtgtgaaaatctgctcacctgcttggccagcccctttcactttattaaaccaagggtcgtgctgggttttccagaagtctaagttgcggtctaatctttgtgcagaagctgaaatagcagccataacgttctccctagatgatttcgtggagcttctttgaactgtatctatctccagtcatttttgtggaagaaattttcttctgtactttttagggatgagaattacctgccttggtttattaactaaaagacaccatgattacaaataaaattaaataaatattgtatcactaaatagataatatgagatagatgtattaagttttcagataaacagtataaaagagctagagtaatttgtaaaaagttgggaggacctattttgtcatgcaggaaacaatttttaacttgcctaccccagaacatagctaccacatggttagggtttgcccaaacctggcccaggagtcatttaccttgagctttcctaaaaaggaggatcaggattttcctctccagactctatcattttaggtagagtccttcttgtcaattctttttaagaacatacatttacttttgtggaaaataaatagatacaaaataaatacatacaaaattgcatagcaattagaaatacccaggaggtatgttatggtcacagacacaaactgcctccaacttctgtccatccatagtgatatttaaagcagagagaggtacacaggtaaccacatttagatggactgggatgttgccacacatacaagcattgataactggcttctcattacctgaatacattcttctgtcagagcaacagactcagctatgcttctggcaaaattgttcttaattctctattgattaatttattcggtaagtatttattgggtattttctgtctgaaaagtgcgattccaggtgctttatgtgtctctgtgtgtgggtgttatataaatacttataatactgtatccatactcttgaaaagcttagttgggaaggcaaggcatgcaataaggaacacagaattttagtcattccacaaccatctgttgaatggctgctattgttagtatcgtggtggaaactgagaagcaaagatgactataataggatctcttttctggagatgcacagtggacacgtagttatatgatgatgataaggactccagaatagttctatacatgatgctctggggccacatgcagattctgatgagaaacaattaactctttttggctgctacctgagaaggggtaattgtcactcaggaggtttttgccttttgaccaacatagaaaggagtgtgagtgaaggctagaggtgtactaacttggtcagggcagggtgacacataaaattaaccatcacagggaagggtagggctggagaggcagactgtggccaggttacaatgcgctgaggctaaggagactgtgtttatcctgtaggccagtgggtcttactctgaagtcttttgggtgggacattcatggacttcaagagacctgtgaatgccctaagattataagtaaaatctgtgagtctgtaactaaagctaaagctatttttctggggcccaccatctaaagaagattctgaagccttagggtagccgtggaggagacatgaaggtccattttgcatggtagaaccctgcctggctcttgctgcagtgtgggaggacaggtttgcaatgtggaggtgtggcaggcatggatttgggaggattggcagaggactcaccatgtccatacactcactgagatggcaaatatttattaatcatccaactgtgtatcagacactaagaataagctgggaggccatggcaagtgaggtcaccacagtccctgccacagtggaggttatggtatacaggtaaggcagggaagagcactgcaaagggtttgcccattgcatcagtcatttatttatgcacatgttgattcaacaattatttctatgccaagctgtcttcaaggtgctggaggaaatgaagcgtacatttcactggggaagacagacaataagtaaacacattaaaatctggcttggcttgatgttggggaggggtgagtgccatagagaaaacaaaccatttatgcagccaacaaacatatgaaaaaaatctcatcatcactggccattagagaaatgcaaatcaaaaccacaatgatataccatctcacgccagttagaatggtgatcattaaaaagtcaggaaacaacagatgctggagaggatgtggagaaataggaacacttttacactgttggtgggagtgtaaattagttcagccattgtggaagacagtgtgatgatccctcaaggatctagaaccagaaataccatttggcccagcaatcccattactggctatatacctaaaggattataaatcattctactagaaagacacatgcacacgtatgtttattgcagcattgttcacaatagcaaagacttggaaccaacccaaatgcccatcaatgatagactggataaagaaaatgtggcacatatacaccatggaatactatgcagacataaaaaaggatgaagtaatgtcctttgcagggacatgggtgaagctggaaaccatcattctcagcaaactaacacaggaacagaaaaccacacactgcatgttctcactggtaagtggaaattgaacaatgagaacacatggacacagggacgggaacattacacacctggggtctatcagggggttgggggctaagggagtgatagcattaggagaaataccaaatgtagatgacgggctgatgggtgcagcaaaccaccatggcacgtgtatacctatgtaacaaacttgcacattctgcacatgtatcccagaacttaaagtataattaaaaaaaaaagaaaagaaaacaaaccagtgtaagaggatggaaagtaataggctcgtttagaatggtgtgagaaagccaggcagggagaaggcgctgagacagggaggtcctggatgtgtttgtggaagagctgtggcagcacctggaacttggggagcaagggaaggagtgtgggcaggcaagggtgagggtgcagggggtcatgctgggccttccaggtcacggaaggacttgagctttactcttgttgtggtgagaagctgctgagggcttggagttaggggagtgaaaagatctctactataatagggagagttcgggatctgtaacttaaccccaggagccagcaaagctccctggaggaaatgcagtttaagctgagaatgggaggataaacaggtgtttttcagagaagaggaagggtgctctaggcacagagaacaacatgctggaatgcttctactagatcataggggcaaaatgggagtgcaggagtaggagagggctttctgggaaagatacttattttaattttgcatgcattgagtttttgaggtttctttggtttgttcatgtggaggtgcagagtgggtatttagcacataggtctgaagtccaggggaggggtgtgggacagcagttggatgtggcagagattccacaaagagcaaatatcatctgagaatggcagagggctgagggcagagccctgaggaacactggtgtttaggagcctgctggagaaagaaaatactgcaaagggaacggaagtggagtggttgccagacatagaagctagtgtctaactagatgtcatgagatgtggggaaggtgttacgtatctaagaatgcaaagttgaacccctgtgaactgtaatacttaagataagtcgtataaattgtctggaactagagcttgattttccaggagagatgaaatgtgtgtaggtgacaggaaacaatgaatatgtgggcgagtgtagtgtgagcaatttctcagaggtgaatttgacagcattttgcttaggaagctacaaagagaccaatgctagttggtgcaaggaattcaagaatttggacttaagtctatataatgatgattttttttttttaacttgagtttcccggtttatcactcccagaatataggcagaagtttgagatttttatgtgtattttctggaaaagatagtttcagtgttttttacattctcaaacaggtttatgatccaaagaaaaggcagtggtcacagatacatgaaacgacaaggtattcaaaggagaacgttgtactttatgacagttctttgggcagtggcttgcaggatgagtttgaggaatgattggaggcaggagagtaattctagtaattcaaatgtggagtattgttgatctctcagacacaaatggaaaaacaaggaattcaaagaaagataggcagagtgttttgaagaaataattgatgaaatttggtaatgagttagatgtaggagatatatttagcaaatatttattaaggactgtattaatctgttatcatgctgctaataaagacataccaagactgggtaaattataaagaaaaagagatttaatggactcacagtgccacgtggttggggaggcctcacaatcatggcataaagcaaaggaggaacaaagtcacgtcttacatggcaatagagtgtgtgcaagggaactgccatttataaaaccatcagatttcatgagaaatattcactatcatgagaacagcacagacaaaagcctgccaccatgatttaattacctcccactgagttcccccaggacacatggaattatggaagctacaattcaagataagatttaggtggggatacagccaaaccatatcaaggacctactgtatatggttaaaattgggagcaaatgagacatgattcttgccttcttggagtttactgtttactaggggaacatacacttgtcaataatcacccaaatataggattggaaattgtggtaagtgccatgaaaaacaagtatagggaattttgagtgtacatagctttggggacttgatttgatgagggagccttatgaagttattgcactagaactgaattaaaccacatttctaggaagtggacatctatttgttggttctttaaatttagctttacagaaatatttcctttaaaaaccaaggcttcttaaatttttaaaactgcttggctaatcaggggaataatgcttttggatagctggtatcgttatttatggttggaaaaacaacagtatttgattacattgagctttaaacttttcctttgattaatgaaaattttattggcccatagtttttattatgctctgtttttacttggtccaagagattctattctctggacccaatatgaataccttcagacatccctctttttttttttttttttcacccaggctggagtgcactggcacgatctaggctcactgcaacctctgcctcctgtgttcaagcaattctctgcctcagcctcccgagtagctgggattacaggcacctgccaccacacctggcttatttttgtatttttaccagagatggggtttcaccatctcggccaggctggtcttgaactcctgacctcatgattcacccaccttggtctcctaaagtgctgggattacaggcatgagccaccacacccagcccagacatccctcttaattatgttgaatatgtaatatcggtgatttcatttgaaaatatttagtagtcgaactagatcaaggcagttaagcttcctatttccatagatgcagtggtattgtgtcttttttatatgatctctcatgcttctggacatccttttttctgctattcttcattccttagctacacttggtgcttcgtggttgtaatgcattgtcatagatgcgttcatttctcattcgatcttcagctctatttctttccagagaatctctacaggcatctgttaggttgaaggacatctaatgtcttaatgtgtagcttggtaaaccagtcaactttctatctgagtcttaagagaaagtgtccaagatgagaaacggtacaggtttggtgacaactcagtgagaaaaagaagaattttacaaggaaggaggtatcttagtaattttgctaaagaagtaggtaaaccttcacttataataaagggatagggctcggttagggtttgtgaagtctccccttaggaaagcaaaccctgaaatattttgaatcttttaaagaaggaaaataagagtcttttaaataaatttttaaaatttattttatatattttttatagacaggctctcactctgtctcccaggctggaatgcagtggtgcaatcatagctcactgcagccttgaatgcctgggctcaagcggtccttctgtcccagcctcctgagtagctgggactgcaggcatgagccaatgtgcccagcaagagacattcattttggtactgtgatggtacagaaaaacaaagggcctttgaggccgaaggagcagaagaaggatggacttagacatggtataggcactttctactaaagagctgtgaagctaaaaatgccaggtctatgacaggtgcagtgggccaaggccaggtagagagcagcaggaagagaggaggtggggacctgtacctaggcccatctgctgggactgatctagccataggtactcagagaagcccagattggtgcctgacccacccttatggcccagacatggacacctcccagtctgttccttcctgctgcccatggatgggctgtgttagtctgtattctgaggacacagctctctgtctagaggaagttatgttatcttgatctgatggatactcaacgtgaacattatttcaacgtgccacagggtcttggagcccagaggaagaccgctcttgccttttagtttatattctttgtttttttttaaataacattttgacagtctttatggagtaagtctgggccaaaatgataattgacaatgttatttacatggatttctaagttggctaaaaaagttcctttatggttagtgaatatagcccatgtagtttccccgtcttctttagatgccttctatttctatgcccaaagtctgcagttgattttcagtaagctgggggtcatcttagagataaaatgtagatgaatggcattttgctgacagcatacatctttgctatttctgaggaaaatgggctctcgctattaaatcttttgtcaatatttataaaaatagtatttacatattctatctatattgtggaaactatacatttattgattcagtcatttgatatcaatgttgttgagtccctattccaagtgaggcactatgctctaagcacatggcattttaaagatgaataagacaccaagaactttgcagatagtaatggaaatgagaattaatcaattgaagattaatatagtaagtagcagaagagaaataaaaaaatcttctagagagttcagaacagggatgttgattcaagtttatggggattaggagtggctggtaagggaggcattcaggcaaaagacataaaaatgcagtattcccctcgcactcattaggatggctactatattagaaaaagaagagagtaagtgttggagaggatatagagcaaatagaaaccttgtgccttgttcatgagaatgtaaaatggtgcagccactgtggaaaacactggtgattcctcaaaaaatcaaaatagaattatcatatgatccagtaattctacttctgggtatatatctaaaagaattaaaaatctgggtcttgaagaaatatttgtatactcatagttatagcaacattattcataatagccaaaaagtagaagcaatccagatgtctatagatggatgaatgggtaaacaaagtctgtgtagtatatacagacaatggcatattagtcacatcatggaccttcaggacattatcctaagtgaaatatgctagacacaaaaagcaaaagtagggtttcacttaatgaggtatctagaattgccacattcacagagaacaaaagtagattggtggctgctaggggataggggaaggagaaaatggggaattattgttgaatgggtatggagtttcagttttgtgaaatgaaaatgttctgaagactggttgcacgatgatgtgagtatatctaacatgattgaattgatgaacacttaagcgtggttacgatggtaaattttgtgttatatatatcttaccacaatttaaaaaatatagcattttattatgtaggcgtgggtgggaagatacttgacacattggaacttctggccatgcgtatactgttcactcacttattccttcattcattcaacaaacatgtattgaatgcttgctatgtgctgggcactgagctagatataacaattaataaggcttataagacattgaatctatcaatttcatgcttgctaaatatctactcccacctccaaaggcactaagcttctacagttagatattcatagctgcttcctactgacttgaatcatgcataggatattagtaaacaagcaataaaaagatttgaggttgatgggggtgggttcaacagcatggtggtgaaatggaaagagatgggtaacagaatatgaactagaattgaaaactgtgagccagtgctctctaatgaacattaaaaaataaagaattcctatttgaggctgccaacctcagaactaagttatttagaatggacgaaattggcaaagtcagacgtactcaacccaaggagccaatattttgtgaatattatggcaaatgtagtttgagaaccactaccacaaaattgtgaaccataataatgactgagaaggcagggagaggttatacaatttgggctaaaaggaaagacagggcttgtgaaggggagcgccagtgaaagtcagtgtggttcgggtatttgggtggggactggaagcaggaagcttgagcttcctttgccaagagaccctgctggaagggctatcatcaattgactttagctcatcttaggattttcattttttaaaaaatgttcacaggaaccttcactccatctatactttcaatgtctgcctacctttctttcttatacaactttgaacactctctccattcatttaaatatattatggagtgccaactacatgccaggtactgtgctgggctcttattccacctttatttgattgcacatgcctgccaagtcctgggccaatataacatctactcctatgtctggtctggcgagagatgcaaactcatcttcctctactttccttacctccttccttccagtcttcttcaagttgtcttcattgaggcaatttcttttacctgtgtttttaatcccaactcctctagtttccttcttggctttattcttttatcttcctctttgtgctttcaaacattccctttctcctggcccatgcccttcagtctacacgaggccttctcaagtctcttcattctaaaaaattcattttcttgggtcttatattcttcagctgccaccctatctgtatcttttcctattctcctccaagttctcaaaggaatgccttccctcattttcatctccttacattccatctgctgaattttggcttgtgcctgtacctgtctaaggaaactccttgctaagagtctgctttgtcaggtctgaattcacttaaccagtctttgctttgttggacttctctgccccatttgccattcttgatcatcctctccataaacctttctacttaaagcattttacttccttattttcttggttttcctagaatctccttactgttcattttcagcttcctttctgtgttcctcttctcttcctacatttttttttagctttctactttcttaaagcattttacttccttattttcttggttttcctagaattttcttactgttcattttcagtttcctttctgtgttcctctgattgtctctctttctacattttttttttctgtgttcctctgattttcacgcagtctggagttgtcatgatcaatcatagcctactgcagcctcgacatcctaggctcaagtgattctcccacctcagccttacaagtagctaggactacagtcacacatcaccattctcagctaatttttttaagaagcatttttatagagatggagtcttgctatattgtgcaggctgggctcaaactacagggcttaaacaattctcctgctttggcctcccaaagtgctgggattccaggcatgaaccaccatgctcagtctctacatgttcctaaagaggagttttgaatattgaagaacagtattttcaaattacattattcaagttataaaaactgatatccagggttatgtggcaatgacgtaaaaatttgaattgttatttttttgacacatgttctgtgttgtccatcagttcatctgagttccaaatgtcccagctgttttatgctttgtctctgtttcccagagaccctgagtgtggtctagagttgggatgagcattggtctctaatggttctgaaataattgtatattcctgcaaaaacattaagtctattagaaaccagctaatttcattttgtcatttttataggtaacatattctggtgcaggtagtatgtttttaaaacaagtttgcaataaacaatttcccctcaaggttaatataataggcaacaccttttgctgcaacagacggcaagaggtaatgaaagattagcttacattatgattcattatttcaaaatgtcaggataaagtggatctgctgcatctcccagagagtgcatgttttgcttttctaatgttaatggatttactgtttttttccccccaggccaaattcagataatcgacgccagggtggcagagaaagattggccagtaccaatgacaagggaagtatggctatggaatctgccaaggagactcgctactgtgcagtgtgcaatgactatgcttcaggctaccattatggagtctggtcctgtgagggctgcaaggccttcttcaagagaagtattcaaggtaatagtgtgttgaaaacgacttctatttttgatcctatgagcagatcctaagagccaaagcgactgaggaaggaagacatagaatcagccatttgtacaaaacatgaatccctagtaggtccactagtatctttggtagaaacatggagaagagacaggatctcaggagaaggagttgacacatggcagggcagctgaggctgagtaattccgcttccttcctttggcaagactcaatcagtcttgagcaactctacagaagaattccactagctggatctctgaggaaaaaagaaatgttgtctgtgccctgactggggaatgccagatggacattcatgtttggtaggcaactttgcctatatgatctggtatatgctgttaattgtccatgcataattatctctctactcaggccttgtccaggcaaatattctgttttgttctagtttagcttgttctcccctttctctcttccatctctttcttgtctcaatggatgacaggatattttgctatgagctgactcagtggttggtgtcttgtaatggggagatatcatctttatcaaacagttattaagtatctacctgtagcatttcattttcccgcctgcctccattgttttcttgtctatagtttgccaattatagctaatatacggagagctatactttatttctactccagaaatgtctctattattgcattataataggataccctggggaaacactaatcatttttactacctaaaatacctatgctgaatatcctttatctgataggaacagagatctgacagcagcttaggctaaccaaattcattttttatcttaagtgtggggcatttttctctcttcttattctttaccttttcagcttaagtgaaggttagtataaacactaagaatatttctgatggagttttcatgtgattccttctacaaaaacccagatttaagtaacttgttgaaaaccagagtccgctaagttaataaacactgattgaagaagtgattctcatggactttctgtgatagctctttcctgccctgatatgagatgaaagctgggggatggtatatagtatttatttttccttccgttgccagtgggactttttttttttttttaaaagctgttcatatcttaatcgagtagcatgtgaggtcaacatggtctattttaaaagcattttcttcgacacattgcttttaacatcttttagaactctgctgtgagacacatggacttttttgttggtatttttatacaattaatgatattctcaatagtaatctttgtgtgtgtatatatatagaaataaattctaaatgtaagttaatatatttattatttttctaaacatatataaatatatatatgcacacaggctatttaattttattagatgatgctattttaattcagaaaaaaatgacatttatattttgatttaggttagtataagcccttagaggtgttttgacaactctcttaatttgtggttttactgtttatttgattttatataatctaaaataccattgtttttaccaagcatttaatttggcagtgaaagagcgtctgacagaggtatggttagtagataggtctaactgcacaactggatggattgagctgagactgtttcctcatcagtaaaaatgatttgaagcagtggttggcaaagtttttctgtaaagggccagataataatattttaggctttacaagggccatgcagtctctgttgcagctaccgaactggattatagcctgtaaggtgacctgtaaacacatggaagtgattatgtgctaataaaactttatttatcagaataggtaacagatcagccctggcccgtggccgatccctgatttaatgtttatttatctgatctaaatacctttatttatggaagggaataggggatttttaaatctaaagttttgattattcacattttactgagaacttactctatacctgattagatgttccgagagaaataaaaaaaaagtgtaagacataatccataataccacaaaatttaaaatgtatttaggaaatttatttgaggaagtaaatgtacttgttctcatgatacaatcagaaagtaagtcagtattgataaagtgttacctgtatgagaaagataaggaaaacaatagagagatgtaagaaatgaaaataccagttataaattaaaattattaagattgaaagtggaaatgatcttcctccgagaaacaatggcaatattctcacaaattttttacatcatttttgttcagcatttaagataaaattatataaattcccataacatttagtattgtctctaagcattaagaacagaaaaaacagaaggaaaatatatttctaaaaatcaacgaatacagtgtgagatgtttcattggtatggcattatctcaagttcaaacattttgaaaaatgtctgcttactctttgatagttaaaaacaagtatctcagctggcgtggtggctcaggcctgtaaccccagcagtttgggaggctgaggcgagtggatcacaaggtcaggagatcgagaccatcctggccaacatggtgaaaccccatctctactaaaaatatgaaaattagctgagcgtggtggtgcacacctgtagtcccagctacttgggaggctgaggcaggataattgcttgaacctgggaggcagaggttgcagtgagctgagatcatgccactgccgtccagcctggtgacagagtgagactccatctcaaaaaacaaacaaaacaacaccaccaccactaacaaaaacctcttatcgccgtcttgtatacgcagaccagctagtagaattttactgaaacagtagcctataaaaatgcaattccacttggtttcagaaacttcttgtgtatcatagtgtgaagtcacttatcttaggcttttaaaatgggataaatattgagtccaaagttctggaagaagcctagaaagaaggcagagttattaacttttagatatagggaggaaccttaaaattattcagttcttcattcattcacttattcattgactagctttactaacaaagccctatgcaagaccctggaaatgcaatgatagaaaaacctggtccctaccctcacagaacttgtgaggtaaagggggatacagactgataaaccagcaattagatgatggtgtcaagatagaggtgaaggcagtgtcttataggatccaaactccactcagtcctggtggtggttgagtctggctatcagaggtttcctgattaaatctggagggtgagtcaagggagcatggtgaagaaggagggaatgcatgtttagccatgtgaatgagtccatgagtgaagaccaggaggaaaggcagagcgcggggaattctatgcgtaatatttaacaaaattaatgtactgttaaacaaagacatttctgggccatggatttaatcctagactgtgtaaaaaccaagtaattgatttcctttatactttaaaagcatttccatgtatttgatttgtttgtgtgtataaaagggaaataccacaacaagtttaagggtttctagttctgctttctcatcatagtcttgataacttggaactaaaaagtttttgctgaaattgtctgtgactctttataaatcacactgcccctcaaacacatttaaggatggtgaagggtctgacacgtaggtgggaagttctgaagatgccgcagctctccctgttttccttgttacttaagaagagagctagaaatgagtgtacatcagattattctcatgttctaagtgttttggttgaagaggtaaagtgtttggcttgaaagcatacaaattttcatccactacttagtgtacaaacttgattacttaagagattgagtaatggcctccagtgaaacgcattctttttaaaaagcaaagtgaaggatgctatttaagtcagaaggggcaaaattggatattttatgagtttattaatcattgcaggcatagaagtagtgttccttaagatgtgttttagacagagtccctgggatgagttatataagcagatctggttgtagcttcagcagccagatactacctttgagtattacttcaaggaaaaaggactccactgagctcactgcttctctttcattattatttcagaaggttgtgtggcgtagagggggctcaggcctacctatacaccactagctatgttgccattttatattatttctataaggtgccaacagaagctgctcatcagatcagacagacatagcccaggcaagtattgatttacagatgatctttggccaggaagacatggtatcagggtagagtctggttatgggtcaatgcagtggggaccttaggtcctacaggtataactgagagcctgatccaccaggccttagaaagcttcagggtgagacagtccagcaccctggatagctcctttaacagctgtggccggtaagcaggcacttatttgctaaagaactcaagcccatttagctggcttcatctgctttgtagagctctgttaaaaagagttcctatttctccacatcctctccagcacctgttgtttcctgactttttaatgattgccattctaactggtgtgagatgatatctcatagtggttttgatttgcatttctctgatggccagtgatgatgagcatttcttcatgtgttttttggctgcataaatgtcttcttttgagaagtgtctgttcatgtccttcgcccactttttgatggggttgtttgtttttttcttgtaaatttgtttgagttcattgtagattctggatattagccctttgtcagatgagtaggttgcgaaaattttctcccatgttgtaggttgcctgttcactctgatggtagtttcttttgctgtgcagaagctctttagtttaattagatcccatttgtcaattttggcttttgttgccattgcttttggtgttttggacatgaagtccttgcccacgcctatgtcctgaatggtaattcctaggttttcttctagggtttttatggttttagttggtgggactgtaaactagttcaaccattgtggaagtcagtgtggcgattcctcagggatctagaactagaaataccatttgacccagctatcccattactgggtatatacccaaaggactataaatcatgctgctataaagacacatgcacatgtatgtttattgcggcactattcacaatagcaaagacttggaaccaacccaaatgtccaacaatgatagactggattaagaaaatgtggcacatatacaccatggaatactatgcagccataaaaaatgatgagttcatgtcctttgtagggacatggatgaaattggaaaccatcattctcagtaaactatcgcaagaacaaaaaaccaaacaccgcatattctcactcataggtgggaattgaacaatgagatcacttggacacaggaaggggaatatcacactctggggactgtggtggggtcgggggaggggggagggatagcattgggagatatacctaatgctagatgacgagttagtgggtgcagcgcaccagcatggcacatgtatacatatgtaactaacctgcacaatgtgcacatgtacactaaaacttagagtataataaaaaaaaaaaatttaaaaaaaaaaagagatcttagttcttttgggcttggggactcactcttgttcacttaaagtggattggttcttacatttattttcatagttgtgtctggtcaccttctggcttgatgtatgcccctatgtctggaaaaggttagagaatggggtagaagtggaggctgcccgcccatcatgtaactgttttatcttttcagagatacaattgggatcctaactctttggtctccgtatttccacacttgctcttatacgattcagtttccatgcaacagcaggagagatattttagatatattaatcaggtcctatggtcttgagtttacagctctcagtgtaaatcttactctcaagagaaaaattttccttctgcagctgaaaacattcgacatattctctctcctattccttctcccccattcactgtactccaggcacaccagcttttatttttatttattttttgctattccccccaacacgccaacatgttccttcctcaggatctcagcacatgtggttccctttttccctttgcttgaaatacccagatctttacttggctggtttcttgtcattcagattctgcccaaagtcactttctcagaagtagtgttacccttccacgagtaatactactcttacttctctttacagctctcaaattcttatgaagttttcctatttattcatttgtttgattattgtctgtctgcatcaggtaccgtgcaaacttggatgtaaactcagtgatagctgatttctgttcagcattgtttgttgctatagctccagtgcttttagtcatgttgggcacgtccctactaaatagtagaatatggcgaagggtcagagtcatgatagatagccggatgtggtggctcatgcctataatcccagcactttggtaggctgagatgggcagatcacgaggtcaggagttcaagaccagcctgaccaacatggtgaaaccctgtctctactaaaaatacaaaaattagccagttgtgatggcatgtgcctgtaatcccagctactcaggagactgaggcaggataattgcttgaactcgggaggtggaggttgcagtgagctgagatcgcgacactgcactccagcctgggcgacagagtgagacttcatctcaaaaaaaaaaaaataataatgatagataaaaactgctagaggctctctgagaaggaagaaatgtcactgggttaggttggtaagagaagtgttaatgcaagtggtacatttgatataagcatgcaaataaatggtagtttggaggaaaattccagaaatgtgaaacagtattgagaaattgagtaagccagctttgagagaacacacggcttattgtcctctccttctgttttgctcctcagctctctaaagtgggcattctctagggtcctgtcttcaatctcagcttctttttcttcttcatccttctctttccacctagtttcctagggaattatatatatatatatatatatatatataattttgtatatatatacaaaattatatatatatataattttatatatatataattttatatatatataaaaaattatatatatataattttatatatatatacaaaattatatatatatgtctggtacaggctgaattgtgtctcccagaaagatatgttgaagtcctaatgctcagtgcctcagaatgtgaccttatttggaaataatgtcattccaggtgtaattagttaaggtgaagttatactgtggtgtaacccacagtatacttccagtatatacttcagtatatgggcccttaatctaatgtgactgatatctttagaataagaagaaaatttggacacaaacacagagaagagaatgtcatatgataacagagagagagagagagaagagagagagggaggagagagagggaggagagagagggaggagagagagagagagaaggagaaagaaagagaggagacagaagagaaacatctacaaagcaaggaacaccaaagattgctggtgcctaggaaactaatataataacataatatttggggcctaaagtgttacagctgcaccaatatctcccaaatcttgctcctagctcctgccccagcctgattttctcagtgactcccctgtgtttccctctgccaccagcccctccttctgcctgctgtgtgtgacagttcccttgccactccctccggcatccgtacttcaaactggggagttagttatttccattgtttcttattgcagcctctggctctgacgtttccagagctgttgcatagctctattgagtctatctccttaaatgcattttcatccacttaccattgctgagttagctgcattacctttcaccaggatgcttgcaataatttattgtttccatttgccttctccttcatctaagccgtttgcttatgtcttttttcttgttgcgagacattctgcacattgccactctattagtggtcataaagcaaatcactgatcatgtcaatacgcagtacaagatcctttaatgacctccatagcccatggaatggtccttaaacaagagttcaaggactgccacaatcttgttctagcctatctttctagtcattttaaagtcaccatttttacttgtgaaataggcactccagacacagtgaattccttgttcttctacaaatatgatgattccatttctttgctgggaatttctttccagatttacctgtaaaaattcttcgaaccctaatcaaaagtgactgttgttaagcccctgaagataatgcagaaattctctctctcctgggacctcgatattagtttattccattgtattgcatatatttgattgcccatgttctgtcccatactgactgtaaagtccttaaaggtgagggcccaatattctcagagtcactcaataaataaataaaagaataaatggaaattaggatcagtttgtgggctttagcaacacaaaaacattatactttttcaacatgggagaggtatgatgaaggagtttttttttttttttgagacagagtctcactctgtcactgaggctgcagtgcagtggcattgtgtcagctcacaacaacctccgtctcctgggttcaagcaattctcctgcctcagcctcccgagtagctaggattacaggcgtccaccaccatgcctggctagtttttatatttttagtagagacggggtttcaccatgttggccaggctggtcttgaactcctgacctcaggtgatctacccgccttggcctcccaaagtgctgggattacaggcgtgagccgccgcacccggctgatgaaagagtctttaatgcagattaatctggcagaggtatataggagggaccagagaagggaaagaatcaaagcgtgaagaccaatttggctgatattcaactagcttagatgtactaaaaatctgtactttttggtatttgtgaaatggaaagaaggggaatagaataaaggatattataatgaaaggatatacattgcttgaaggtaattaaatatgggttatccaggagataaaagagttaaagaggttcagacatagactgaatgaactgagaaatgaatgacttggtcaccaagaggaaggccagtcatcagggggtaggataagttcaattctagacatgctgcatttgagatgatagctggatgtccagatggaattatccagcagccacagaaacagaatcagctctctgcggatattccaggggtggggatttgaattaatttcctcaattaattttaaagaaacttgatgaaaagaatggtctgaatacttcttgaaggttgcacattattaataatggagaaataactctaaaaccttcctcttgattttcataataatataagcattccctgaatcttaccaaaccttgtaagaaacactcttattataaaaagtgtatgtgcaaagcccttctaaacaggaaaatgataaattagtcctacagggccaaatgcagctctctgggagcttacaattcagaaagaacatcctgctaccagcacattaagctgtacaaatagtaaactgcagaaacaaatataagcatttttatgatgtccaaacaagaaccaagcaggtgtttttttttttttttttgcagattatttatactgtggcagttcatagcctccttttcggacccagagcttgcataatccttcccttatttctacttacgtgttttactctccatcatgtgttaacatacatactgtgcaacagaaatgactatggaggctgagggcagcagagttttagtgtgtacacatatgagctgtcatgtaattttcaagtgaaagcctttgcaatgaaactttttaaaagaaagtcatggccgggtgcggtggctcatgcctataatccagcactttgggaggctgaggcaggcagatcatgaggtcaagagattgagaccatcctggccaacatgatgaaaccccgtctctactaaaaatacaaaaattagctaggcatggtggtgtgcacctgtagtcccagctactcaggaggtggaggcaggagaatggcttgaactcgagaggtggaggttgtagtgagccgagattgcaccactgcactccagcctggcgacagagtgagactcgtctcaaaaaaaaaaaaaaaaaaaaaaaaaaaaagagaaagaaagaaagaaggaaaaagaaagaaagagaaagaaaggcgggcattaacttcaggtattggtaaatttgctaggtgtttggctactgtttctcatcagagaaatagaaagacacaccatgaaagtcaaggcctgaaaacctcattccatgtaagaatgacatccccagtgttaagtgcttgttagtggttaatgcgatcctgtgaaacttagatgtgtttgtgcacacatgcacgcatatatttgaagaactcagaagagttaaatcacagcctttcaacctgtgaaatgacagtagttcttcttttttcctctccctttggctaagtcatctttatcttggagataattaagacaaaaatgcctctgacaaataaaatcagtatagaacccctatttcttggcagcttttgtggacacagctgaagctttcagaggtcttgaaaaaccatggcaacaaatgcctttgaagggtaagcaaaggttccaaatgtttttaatcgctggtgttttttctgctaccacttcaagcatttttcttcattttttgttcatctgatcaaaattaaatttccaatttccctactaagtggttctgtcctggtcatgccattgactatttccattaaagtagtagagtttgtgcccacatatggttgttaagctcatcaacaattccattagaaagctttgtttatcagtggcaataatttcccataaaaattatagataggttttaatgggcacattttcaaaaggcatcaactcgtcctcaaaattatgtgctgacactgttcttacaaccatggttcgtggcctaattccaccaaatttctctctttttcatagagaactgttgtcagtagctttatatccttttaaagagaatggtctgtatctctgatactcattcagagaaatgagtattttagacgtaggttgctaattttaagctatatactacactatgtcagcactatataggttatcttgtaacctgcttgcctggctatttggctgaaaaataacaacatgtaaggaaaatctatttcataagtctaacatttactttgtaaaacttgttctggctactctgttaattttccacttacgtgtgggttagagagcagatttgatttttttttaagcgaaagatatggcttacctgagaaaagaacatagtggggaaagcactcctattattttcctcatatttccattttcctttagcggaaataaaaagacatttcagtttttcagttgctaagaaatgaaggaaccaaagacaaaacaacttaattattaaattacaatttatttctgtaataagcactcgttctctctgttttcctggggaaagagtatgtggactttcaattttatccaaataagcatcatctttctctgattagtgtggcagtttcaaaatcatgtattaggaagtacagagtgaatgagtagagaatttctaaattagcacccaaggttgggtggctagattatgtttataaatatgaacttttgtattaagtgcaatgatttaaaagaatgcctgcatcactttagggcatttcattaagtgctgtgcacaatatttttccttatacatcataaaagataaattatagttcataaaatagtataaattcctaattattttgtgcttttgacacctcagagttactaataagggatttcgttttaaaatgatatttatttatttatttagagacgcagtctttctctgttgcccaggttggagtgcagtggtgcgatcttggctcattgcaacctctgcctcccaggttcaagcgattctcctgcctcagcctccagagtagctgggaccacaggcatgggccaccacacccaactaatttttgtatttttggtggagacggggtttcactgtgttgggcacactagtctctaactcctgacctcaagtggtcctcctgccttggcctcccaaagtgctgggattacaggcgtgagccactgtgcctggctcgttttaaaataatttaaaagtatattttgccaccactattaaccagttaagccatgatggtatattataatcaccatggagatggtttttctctttattttattttgtttgttttctgattgctagcatgctgattactcttcctattctacaagtgcctgcaggccagccccatttttgctctcttcacttcatttttcatttctccctgtttcactcttcatagcacatttgtactctgtccacacctagagacctccctgttgaagttcttcacattctcttccctagagagggttaacttgttgagctcagagacttaaacttaaaataaaatgtaacagatatgtattgaatgactattttattttagctctaggagaaatgcaaagatatatcatccatagaccctgaaatccagctaagggttctgcttatacacaaggtgaaaggttgtgataatgcacattaaacaatagaagagttaaattcagcactataagtgatgcctcaaagcagcataatgggaaaaaggggtatttcagaaaaaaatggtatgagttcagaggcaagagaaaacagaatgctctagattaaactcaaagactttatggaggaggtggtgtttcaatagatacctttccacagaaccatgaagagagttctacttaattgtaagtggcctgtgatttgtcgttagtcattgcatgctcaattctgcatgtgtgataactgtgtatttttatggcaaaatcgcaattacttttgcaccaacctaatagaatagtgtgggtttaaaaaaactatttgtaatatattcgaacatatttcttatatatatgtttcaccatcattagcagtaaatctattttgcatccagagattgaataatattttgtttctaggatgtgagtgatgtactattttaacttacttttgaagtttgacatgggagtgatattaataaaatctaaagatgctcctaaagaggagcaatagataatgtaggtatagataatgtagctattatggaggtaagtgtatttgatactttttattatgatatgaagggaaacaactagtcccaagctacaatttattaaggtaggcttagcttatacgccataatttttatgtttgcaactttcttgattttcttcctctggctttacttctatgggatatttatgaaaggatgtttttaaaaatggctagagacttttgcttctaagagttgacataaacttttccacaacatgaacaattagtagatgatacacttagatacactcttgaatttttaaaattgtggcagtaaaactgatctcagagaaggaagaaaatgctttggccagcttttatcaattatatacaacgtgtttggaagattcagttcctctcgccttctttctccctatataatactttttcttaaggttggtactattgatgcacttggtgtaaacacatgagataatagcaaaatatgaatctaggtcccagaaatgggcttctttcactctgccacctgttctgactgcatttctcctgactttctgtaaatcccggggaggagctggaagagcaaggtgtgtgctagcataactttggggatgaagtacccttctttttttctgattttgttcccacatctccttactggaccaagtaagggcatcagtgtcaaacttcctgattgaagatacatttttgccctaccatgaagggctctgggtaacatttattgcttataaaatgcttttttggtggctactttgtttctgaatataaggcaagataaaaagtttgattcaagagtttcttgtaaacactttgtgtgtgcgtgtgtattcatatatggctgcacacgtacataagtccatacataagtacagtccaccctccatgtttgtgggttcaacatccatggattcaaccgactgcaaatcaaaactatttggaaaaaaatggatggtagtgtctgtgctgaacacatacagagattttccttgtcattattccctaagcaatataacaactgtttacagagaatgtacattgtattaggtattataaataatctagagatgttttaagctatatgggatgatgtgcgtaggttatatgcaaatattatgtcattttatataagggacttaaacatctatagattttggtgtctgaggagtcttcgaacaaatcccccacagatcctgaggggccactgtatatatatatcttcataaacacacccacacacacaaacacacccacccacccacacacacacacacaccaatgtgtatatacttttttttcttttttttaattcgagaccaagtctcgctctgtcgcccaagctggagtgcagtggcgcaaacttgcctcattgcaacctctgcctcccgggttcaagtgattctcctgcttcagcctccctagtagctgggattacaggcgcctgccaccatgcctggctaatttttgtagttttagtagaggcagggtttcaccatgttggccatgctagtctcgaactcctgacctcaagtgatttgcctgcctcggtctcccaaagtgctgggattacagatgtgagctaccacacccagttgcaatgggtatagacttttgaaatgtgtactacaaaatattaacagtgactatctctgaatgataggattatggataaattttgttctttttgcatatctgtatttttatttttccacagtaaacatcttttacttctgtaataaaaacttcattaaaaaatccatgctgcaattgattaattatatactaacttttttttactcttccctcagtacagaaagattattctgtatttaccaaatctttacactttatttgcaaatcattttgactgtctgtttgcaagaggtcaaatttgcactcaagttcagctttcgttcattatccatgagcccaagagaaattgtgtcaggtggacatcaggtagctgaggccaatacaatattattcctttgggttgttgagaaatcatagcagaggaaagcctgtgttgataatagagtaccaccaggaatctaggtctttacagctgctggcctgaccagcaagggtaaaatatttcagtcacgcagccagtgattattaaccctagctctatattccagagaggaagagctagcctttttgggttgtgatctgtcactgattgcagttgcacatatactagccatgaggtctacacacatgtgaagagcatgctacacacatagactagatacactgactcatcagcctggaaacagtgcctgaccctcactttgattgtttgaatgtgtcctgacccattaccctgcctttggatccgttcctgtttttttttttttttttaaagcattttatctgtgaattaaaatagtactttccattgcttcatttttttttccctgaggagtttagctttgtttaattagaaacaagacaacaatcattactggtctggtgcaatcttgtttaggactcctcttttgcttagaactatacctggattagggatcactgtgatttagagtgtgcagtatgaggttatttaaatacttaatagtatatttgaaatgaaaagagtagaaattaaagactgaatcatttaccaagaaataacagaggagaccaatttacttctgtaagatttagtagaggctgttcccttctttataattggctttgtttcagttaccagttaagtggggtgaactgttattaaaaggctatgggtaaggttacagtagcattcttctaagaaaaactacaggagtagtcactgtgcagctatctgctttgtacctgccaatatggcagtagatatggaagggtcagaaaaacaggacttcatgttcaataacttttcctttttcctttctttcccttatttttttcatgtcttgtatgcaagatagcatgcctattctttaccttcaatgtatttttgaatttttaatccagatcatattttatcacaatttgtaacatgtagctaataaaaatggttattacatgagaacttgctttacaaattatagatcaaatttttatacaaattattatgtcaccatagaaaaatagttacgatttatctgtttagtcttagaaaaattatttcacatattagttaaggcttttagttttgagtgagcaaaatccaattcaaactagctttgggtagaggtgggggtaaaagagaggaatggatttcaatggaaggtttacttgcgtgtcttggctaactgcaaacatggcagggtgcaaccagaccttagtgatcacagacccagggactcagaccctgtgaggaccttagccttaccgccactcttctccatgtgtcagcttcgcgttctctgtctgcaagtatgcattttccctaaggtgggaagcagagttggcaacagctgccagggttgacttcctgtggcattcttgcagttagcaaatattagagaaggactctgcttggcccagctttgggacacacctctggaccaactagctgttctcaggaggcagtaacatgtacagaggtgatccctggggctcgccctgtgaaatcattgtgagccaatcactacctccctccctgatgctgatgtctactatgtttgatgtctctgaacttccatttcctcaattgtgaatggcaccctggttcctaccttgctggatagatgtagtgattagagttcatgcttaacctacaggtgctctgtaaagaatcattggcatcattacctcttgttggctctatcccattccctatagatatctttctgctctgagactaagcagagaaaataatttaacatttaattattgtgcttctaaatccacttttacctcttctttctttacttttctctttattatttttaattatttcaaaaataaaattgtatatatttaaggtgtacaagatgttttgatatacatatacataatgaaatgattactgcagtcaagctaattaacatcaatctcctcacctagttatcatttttggggggcatggagtgagagcacctgaaatctctcttagcaaatttccagtgtataatacagtattgttaaacatagtcatcatgttgtacattagatttctagacttgttcatgctacataactgcaactttgtaccctttgaccaatacctctctattttctccactattccatgcctgaaattgtgggatataggtatatagtgtgtgtgatatatatagagggagtgatatatgtatatataattgtgtgatatatatgtgtgtatatacaaacacacagacatacacacatgtacatatgtatatacatgcacacatacacaatgggatattattcagctttcaaaaaggacatcctgccatttgcaacaacatggatgaacctggatgacattatgttaagtgaaacaagctggacacaaaaagaaacatgcaccttacttcttagacacaaatttctttctcatagccagcacctgaaaatagggccaagtattttgcatgatttacaattgactgtataaatgtagcatagccagttatatgatgtgttaccatttctgctataaaatcaaaagaagagatcagaacatttaaaaacttccctgtggatttctacctcttacctaagctttgttcttgtttttttaaacctcatgaacacgaagctttagatagcggaggtcatgtatccttgggctcaaatatacagtttcttagcaatctttgattgctacattgcccttttttgtgtttttaactggccttccctgacttaaaatatactttaaaaaataacaaaggtggtatttagtttgcacagtatggaattaaaggtaaacaactttaaattaaatttggttggatgtataaattattaaaatatcctttctctcatggctgggtaagtctgcattttccattcagcctgctatgtctctttccatgagaacactcccgaagaatggggccctgcttccaaacaagccaagcattttgtagtaaattttaaaaagctaaatttcataataacctttataattgctacctgaaaatggagtttggaatggcaccaaattattaatcagtagaaggagaatagattgcaaaaaggtaattatatcaaattgaatgcttcttgaaatatattctgttaaataaaatacagttcctcttccctgttctcatttgtaagcaatgaggacaattcaggtagcatgaatcaggaatcagagtacttttctgttccgcagattggcttaatcattttgggctcacttcaaactgtagatgagcattgtcctttaacctgccgggcagcagaggtgaccacgttcactgcaaagcccagaagtgagttgttcatctgggttagggtctcaggaagaggcatgttatgacttccccacattcctggacagtttagactgtaattcttggttgtttaaaaaggtgtttgaatgtattttgttcagaggcttgagtaaatggctcttattcttacacttttttttttgcctgctttttccagcattagaatagtttcagccctgacaattagccttatgctgactggagtggattttttgcgtaggaccaagtgttttgcatgatttacaatggactgcataaatgtagcctaacaagttatatgatgtgaagaaaattacttaagggtaaaaatggattgtttactgagaaaatgatgttattataaactggtttgagggtattgtggtttagatgctgtccttacaaatttgagctctgttggtttggagatttaatatctaataataatagttaatgtgtaatgaatacttgccctgctccaggctctatgttacgtgtcctgaatgcatcatctcatttaatcctccataaaatttgaagcagtcagcattgtaattaatctcacttttcagatgaggaaaccaaggtatgtaagaaacaaaaccagtgttgaatctgactagtacgactgcaaagcctgactcttaaccattgtgttctgttgccttctccaagggaaaggagtgcttccagaaaggccattggaagtgaggagtgtcacctgataatagctggctcctcatcccactaggttaacaggcaacagatgggggccacagagttggctggagttagtcctggttgccaagggtaaatggggctgttaccatgcaatggatagaaactaggatgctcctgtgtgtctccttatatcctaccaggtgtagcatgaaggttaaggacaattccgtcctcttatttggagaggagaccaaggccctgtaggactaaaggtttgggtgagctgaaagccaagggcaattggcccagcttggggaggagagttacaaatacatttgtgactatcagaccagaaacagactgcggtgttcacctgcggtttgggtacctgctgcttgttctttgctggggtatctgaagactgaaaacacagctcacacttagcctttttcctattctgtgtgaaagaactgtagtagttttctcttgcttaacaaggttctagtggtgaagtttattgcttagtctgtgagttgtagggaaataaccacaggatgggatggtagcagaacgagaaaagaaaagaagattgtagatgccaggctggtgtcggcttgaaatttttaaagtatacagttcttctttatggattattaaaaaaaaacagcaaatgaatacacaagattaaatgttaagcagtacaacattgtacatgatgaaaggttaaagtctttctctggtctcattcaaaaatctacagtctcttgtagtatagtttgaagtcaggtagcgtggtgcctccagctttgttcttttggcttaggattgacttggcaatgcgggctcttttttggttccatatgaactttaaaattctgtgatgaaagtcattggtagcttgatggggatggcattgaatctataaattaccttgggcagtatggccattttcacgatattgattcttcctatccatgagcgtggaatgttcttccatttgtctgtgtcctcttttatttcattgagcagtggttttgtggttctccttgaagaggtccttcacatcccttgtaaggtggattcctaggtattttattctcattgaagcaattgtgaatgggacttcactcatgatttggctctctgtttgtctgttattggtgtatagaatgcttatgatttttgcacattgattttgtatcctgagactttgctgaagttgcttatcagcttaaggagattttgggctgagacgatggagttttctagatatacaatcatgtcatctgcaaacagggacaatttgacttcctcttttgctaattgaatactctttatttctttctcctgcctaattgccctgtccagaacttccaacactatgttgaataggatggtactggtaccaaaacagagatatagaccaatggaacagaacagagccctcagaaataataccacacatctacaaccatctgatctttgacaaacgtgacaaaaacaagaaatggggaaaggattccctatttaataaatagtgctgggaaaactggctagccatatgtagaaagctgaaactggatcacttccttacaccttatacaaaaattaattcaagatggattaaagacttaaatgttagaactaaaaccataaaaaccctagaagaaaacctaggcaataccattcaggacataggcatgggcaaggacttcatgtctaaaacaccaaaagcaatggcaacaaaagccaaaattgacaaatgggatctaattaaactaaagagcttctgttctttgctggggtatctgaagactgaaaacacagcaaaagaaactaccatcagactgaacaggcaacctacagaatgggagaaaatttttgcaatctactcatctgacaaagggctaatatccagaatctacaaagaactcaaacaaatttacaagaaaaaaggaaccccatcaacaagtgggtgaaggatatgaacagacacttctcaaaagaagacatttatgcagccaacagacacatgaaaaaatgctcatcatcattggccatcagagaaatgcaaatcaaaaccacaatgagataccatctcacaccagttagaatggtgatcattagaaagtcaggaaacgacaggtgctggagaggatgtggagaaataggaacacttttacactgttggtgggactgtaaactggttcaaccattgtggaagacagtgtggcgattcctcagggatctacaactagaaataccatttgacccagccatcccattactgggtatatacccaaaggattataaatcatgctgctataaagacacatgcacacgtatgtttattgcggcactattcacaatagcaaagacttggaaccaacctaaatatccaacaacaataggctagattaagaaaatgtggcacatatacaccatggaatactatgcagccataaaaaaggatgagttcatatactttgtagggacatggatgaagctggaaaccatcattctcagcaaactattgcaaggacaaaaaaccaaacactgcatgttctcactcataggtgggaattgaacaataagaacacttggacacagggtggggaacattacacactggggcctgttgtggggtggggggaggggggagggatagcattaggagatataactaatgtaaatgatgagttaatgggtgcagcacaccaacatggcacatgtatacatatgtaacaaacctgcacattgtgcacatgtaccctagaacttaaagtataataaaaaatatttaaaaaatctacagtccctttctcaataggtaaacactattaacaatttcttctgaaaattacatatgtacacacacacacaccccacacatagatattttgttaacatacattaccttatgctctacacattattctgtgcctagcttttctcatcgaataatgtgtattggagatctttccatataagtacatattggtctcactcattcatttttaatggctgtatattagtccatagtatggagtaataataccttttattggcacaaagttttgcagttgacaaagggtttgcatatattgtttcattgggttgtatagcagtcatcaacggacatatcaagaatcccagaagggtaacctgggcttcacccaggatcgcatggagcttgggactcaaacagctaacattccctaaacaggcccatattcctgcaatttagtgcagctgctacaacatttaggtaaactctttgaaagcagtaaaaagatcaccaatctgggacatcaagaagccagacgacaaggagacatagacctcaggtgagtgagaaaagagaataattgaagtttagaactgaatgggcactaacgaacaacagatacatctctttcctttcaccgatgaggacctgggtgtggcctgtggatgttaagtagcatgtttaggccacacagctggattgttttctttcctgaggctagctctggagaggggaggaaacggagatgctagatttttccgggctctcttttctcatcagctagaatgggatgtggatggaatgcagcttgagaagccaaacacccttgagaaatgagaactctgctttctgatgtggggcgcatcctatctgagataactctcctgccagcgcagtatgaccattgcgacttgagctgtgtgggtgcccaggtggtgtagaccttaaaaccactcctgcttttgtttactgaatgtctaatattcacacagttctttgtctgagtgcagggccaaagcagcaaataacgaagaagctgtgcccaaccataagaactatgaaatgctccagatcatctacgctagtttgagttaaatttaccatgcaaataaatatagaacatttcttcttatgcatagattgtatttgttctattaaacaaccatcctgtaaaggttttattcattcatttatttttatttgttaggagaaattgttatttaagctaagaaagtagactagtagttatttctttttttttgcttattatactttacgtttggggatacatgtgcaggttagttacgtaggtatacacgtgccatggtggtttgctgcacccatcaacctgtcatctaaattaggtatttcttctaatgctatcccttccctagccccccaccccctgacaggccccagtgtgtgatgttcccctccctgtgtccatgtattctcattgttcagctcccacttatgagcgagaacatgcagtgtttggttttctgttcctgtgttagtttgctgagaatgatggtttccagcttcatccatgtccctataaaggacatgattgcatccttttttatggctgcatagtattccatggtgtatatgtgccacattttctttatccagtctatcattgatgggcatttgggttggtttcaagtctttgctattgtgaatagtgctgcagtaaacatacgtgtgcgtgtgtttttagaatagaatgatttataatcctttgggtatatacccagtaatgggatggctgggtcaaatactagaaggctacagtaaccaaaacagcatggtactggtaccaaaacagatatctagaccactggaacagatcagaggcctcagaaataatgctacacatgtacaaccctctgatctttgataaacctgacaaaacaagcaatggggaaaggattccctatttaataaatggtgttgggaaaactgactagccatatgcagaaaactgaaactggaccccttccttacaccttataagaaaattaactcaagatggattaaagacttaaatgtaagacctaaaaccataaaaaccctagaagaaaacctaggcaatacaattcaggacataggcatgggcaaagagttcatgactaaaataccaaaagcaatggcaacaaaagctataattgacaaatgggatctaattaaactaaagaacaactgcacagcaaaagaaactatcatcagagtgaacaggcaacctacagaatgggagaaaatttttgcaatctatccatctaacaaagggctaatatccagaatgtagaaggaacttcaacaaatttacacacacacacacacacacacacacacaaacaaccccatcaaaaagtgggtgaaggatatgaacagacagttctcaaaagaagacatttacactgccaacaacataaatatgctgccaacaagcatatgaaaaaaagctcatcatcactggtcaagagaaatgcaaatcaaaaccacaatgacatactatctcacaccagttagaatggcaatcattaagaagtcaggaaacaacagatgctagagaggatgtggggaaataggaacgtttttacactgttggtgggagtgtaaattagttcaaccattgtggaagacagtgtggcgattcctcaaggacctacaattagtagttatttctaggtctgacgggctgtcttttagtttgttttcttattctgaggtggacttaaaccaattttaaaaacagggatgactgaattcgtgtgttaatcttgtactacaggaaccctttgacattgattcagaagcacccaagtgtttgttcattaatccttttttatttttgcatattatttatttttcaacttttattttaaaaatcaggggtacatatgcaggtttgttacaaaggtatattgagtgatgctgaggtctggcatatggatgaatctgtcactcaggtaatgagcatagtacccaatgatagttttttgtacccaatgatagttttttgttttctttgtttttttttgtttgtttgttttttgagatggagtctcgctctgtcacccaggctagagtgcaatggcttgatctcggctcaatgcaacctccgcctcccagattccagcaattctcctgcctcagcctcccaagtagctgggactacaggcgtacaccaccatgcccggctaatttttgtatttttagtagagatggggttttaccatattggccaggctggttttgaactcctgacctcaggtgatctgcccacctcggcctcccaaagtggtgggattacaggcgtcagccactgtgcctggccccaatagatagtttttcagtccttgcccctgttcctccttcccacttctagttatcaccagtgtctattgtttctgtctttatgttcatgtgtaccaaatatttagctcccacttataagtgagaacacatggtatttggttttctgtttctatgttagtttgcttagatagacctccagctgcatccacgttgctgcaaatgacacgatttcattcttttttatggctgtgtagtattccgtggtgtagatataccatatattctttatctaggataactgatgggcaattgggttgattccatgtctttgctattttgagtagtgttctgatgaccatatgggtgcatgtgtcttttcaatagaacaatttattttcattactcttatcaggatacctgggaggaacttctcctacgaagttaatttggggggactcctgaagatgagtgaaaccccttattaagcacttagagggtcgaaagtgtacaagggaacgttcaggtgtgacagcttgagagacatgcatattccacccccacaccagagcttagtgaaccgtcttttctattttctcccaaagcaccaaaatggcccagaaattggaagatggaaaatggacttatttatgagtctgggaaggcagggcagtaagcacagtcctgttcagggttctgagttttaccctcttgctctgattgcgagatcattttcctcttccttgcttcttcagcttaggacaagaacagtttggaaattgtttctactactttggacaccatagtttagatttcaaatgagtacaagtgggaggaaagcttggataattctctggaaataatcgaacagagtgaaggagaggggtctacaggtgagctgaatgctgcatggcattgaagtaatcacaccagtcgtcacaattctctcctctttgatggttatctgttgtcccagaaggaacaatttcagaaagtccttttctggactgtagaatagcacttgcttatttgatgagccctgagaagcattactgaaagcggttcattgtccctgaggtattacaatgagatggtggtcactgatttcattatgttttcctttattgcagctgttggtttgatcctttgccaggtgcttaaaacaattgtggttttgcagatggtaagttagaggttggacaaaaaaagggatcatgtcactgccctggccaaaatttcaacagactggggtctagtgagggcaaatagatagaggctttcctcttcactttgtgttatttagaaaaagaaactttccaggacaaatttctttcctagaattccttttttaaaaattttttttctttgaaaatttacttagatgcaaataatatatttttcttccttttaaataataaaagtaagatgtctcttggaggtggtggttgtcactgacaagattaactagaactgactagctgtaaaaatataatttgggatgcattattaaggcatgccatttttatttgcatgccattgtgtacagatgtggttgtgaaatagttcaaatcatggcacattgaatgtcctcactggatttttaggaatgtgttcactgagacagccaaatcctatttcattttctttggctcattgcattggctgtaaattggagatattcactttaatatgtgagtcaaaatttatttccaaacataatactgcagttgttctgtcacagaatataaatttcttatttatttccttaatacgttgctttctactttttctttttttctttattttattctggagtatgtggaaaggttttccagaaagatttgcatatgccataatctactgatgaatactttttttgggttactctttcatattttgggagatataactatggaagtgttaggaatcatgggttctggaaatagttttattactgcttctgaaatgccctcccaatgataccatatagtaattccatcagggaataatatttttattatagtttaaaatataacttaatatttaggtgctcttgttcagtcatcgtcaagttctttttatttcaccaaccctaccatggcactcctgaaagacttgtgaatgcgacagacctggatttaatcatggctttgccatctgctagccaagagaacttgaacaagtgagtcaacttcttggagtctcattttctgcttctgtaacatgggaactagggtaatctaactcattgcttgtgatgattagatgaggcaaaatgctgagttcacctagcccagcacctggtccatgggaagcatgtgggttctgctgctacccagtccttggcccagtgcatggtgcacagaagggaatctgaacaggccaactttattcctattcttgacccaccccatgtagatgcttcctacatcttcagcttcttcttcttcttctttttttttttaaggcagggtctcactctgtcccccaggctgaagtgcagtggcacaaccacagctcagggcaacctcgacctcctaggatcaagtgatcctcccacctcagcctcctgagtaactgggatgacaggaccacactaccacacttggctaatttaaaaacttttgtagagctggggtcttgctatgttgcccaggctggtctcaaactcctggattcaagtgatgccctcacctcagcctcccaaagtgcctggaaaacaggcctccacacccagccttcaacttcattttaaaaaattgtggtaaactatacaattcatccatgaaagcagaaaccacttgtaccccaaaagctattgaaatttaaaaatatatatattaaaaataaaaataaaattgtgataagatatacataatatgaaatttactactttaatcatttttaagtgtacggttcagtggcattgagtacattcacatttttgtgcaaccggaacttttcatcctcccaaagtgaagctctgtacttattttttattttattttattttttgagatggagtttcactctagtcgcccaggctggagtgcagtggtgcaatctcggctcactgcaacctctgcttcctgggttcaagagattctcctgcctcagcctcccaagtagctgggattacaggtgcccaccaccacacccagctaagtttttgtatttttagtagagacggggttttgctatgttgggcaggctggtctctaactcctgatctcaggtgatctgcccgcctcagcctcccaaaatgctgggattacaggcatgagccactgtgcccggccagctctgtgctcattaaacaatgactccaagttccccttccccacatctcctgctgacctctcttctactttctgtctctgtgagtttaactattctaggtacgtcatgtaagtgcatctatgtgatatttgtccttttgtgtctggcttatttcacttagcataatgtcttcatgattcattcatgttgtagcatgtgtcagagtttccttcctttttaaggctgaataatactccactgtatggatagaccacactttatttatccatttgtctgttgatggacatttggatgatttccatcttgtgggtatactgagtaattttgctatgaacatgggtataaaaatatctatttgagtttctgctttcaattattttgggtctacacctcaaagcggaattgttggaagtggaattgctttccacttgttggaagtggaacatggtctcccacttcattttgacacaacttccaagcttcagaactgtatttacaacagcgtgctgggaggtcgctttgagtttatgacggaaatctcatatcaacaggttttaaattgttccatacgacttcttgccacccctgtcccaattcagatcttttttttgattaatggtatgaacaattttcaaaatatcctggcacaatctattagaatatttgactttctcctcctcctccctttagccctaactatttggcaaagctgttgaaaacttcttcacatcttctctctgcctcatctactttgctactcaaagatgattagtagatgttttggtatgattttttttccttggcataactgtgaatacttttaatccttcatgttttatgacaatcatacattcccacttttgtgtaaaaacattttgaattcttctttctataacaaattctttgccagtcttccttttctttttgcttttagtgagttccaatgatatcattgtttgaacctgttttctaattctatgctgctattcccatactccctctttgctttggttacagtagataatgtgggtggtcctaccaagacaaagcatcactcaggagtcaagggctggggtagatacagacactaggtactgcagaaagtcaatatctttctcagagtgtaaggcaggacaagacttctgttcccttgtaccgttgtggctggggagttggactgtgcatttcatccttgtcatataagtcaaagtattgcccaaataacttaattttggtgtggtcttagtaagtatttgtctcgtagatatgttaaatagaagacagtaacattgggttggctgtgttaattcctcactttttctttcctatacatgagcttcctaagaagcggaacacttggtggtcagacagttgcagagattccttgcatgattgcaatctggaaagtagataccattcttgaatgaagagcttgccctttggagaagctgggctttccatatatggaggttgttagaatgcataagagttcagcttctggaatgaaaggagaccttggttcaaaacccatctgccacttgcttgctgtgtggcttaaatcaggcttttaaacttcaattataattttgcatctgtataataggattaatataattccttcctcataaagttcctagggggttaaatgaaacaatcaatgtataacacacttcctggcatgtgatgttcagtacctagaagactcggtttccttggtagagagaatatttggctagacaagcttatggaattacccccagataggaagtgagcacaagtgtgaaatgaacaagccagagcaggaacggctcttggaagcgtctactcaggcctgggcagttgctggtttatataacagtgctttgaaaattcacgtgcagattcttactattttcccaaatgttacagctcaaaactatgttgtctgtaccttaacacctaaaggataatatagtctttcactgataaaactaaaatgtcataggttttcctttggccaaatatgtatagaaacttgtgatttcacatcagatttaaagctgtatttaacactctatgaaaacatactgatgcttagaagtagaaaggaagtcagattttgacatcttacttgtcaacttaaattatttatagttcctggatgcttcaaaatgtgataaaccatagttaattttatgtaaatattcgatgagtgcctttaataaggagactgtaaaggtagccaagctttatatatgttagctacatttatgggtcaatcgggtataaaaaataggacttcgaaaataaaatattattttgtcggactcctccaatgaggctttttcgcaggattagctaaaattggctcttatttgatgtgtgagtgcttaaacattggagaattcatttttcttttagaattcatttttatttctgagccttaaaatatgaacagttagctaaatgtttgtatatgttgataaggaatgctaagtgtttattccttaatgggacgacaccttttcccggtttacataacttgccttttaatctaaccttatgaaagtctccttgactttaattttttttcagagtactgtatatctctttagggaatgcatttatttaaaaaattataaagcaagaatagatgtgatatattttgaagttttctagtcacaaattaaatccctagatgtgttgtagtttgtggagcactttgaaatgtgccaattcaagatggaaatagcaggaaagaaccattcaagtacgatttctgactccataaagttaggaagttatgataaaggaaaaataactacaccacatacttatggcacagaattgcattattgggacaaattgatcttcaaatttgtaggctatgatggaagcaaatatttgtagtatcttaatattcaactgttaagccaggagacgagtactctgaacttcagcttctcataaaatcagtcagttacatgacagtttatgtagtttatatgtaagaaaccctttgatcaagatatgccttttcttcagccttgttaatacttcatttataaggatttttatttctaggaaaataataccatagacctattttatttaaagctaaagtgtttcctggtgatggtggtgaatggggagatgattcaaggaaactgctaatcttgtagagtttagtaaaatcttggaatagaaattttaaaaagttaaaacacactatgaaaacaaatcattattagtaaaatgaaccatattaaaatgtctccataaccaacgtattatagcaggggaaaatggcattttaattcagaaaaacatttctatataaaacaagctttggaataatttgaatatgttgatttttctttggggcaatcatgaaatacagtcatattaggaaagaggcaaggcctcaaaacggaaagagtagtgaggataattcatgagcaatgcgtggcttcatggatcccttcctggccctcttcatctatgaacatctgctttatgttcatgtctggcctcacccagtgctgaagagcagactgcccctgcttagaaccaagccttgttcttgtggatttgagttttggggtcctgaggtagaatggccatcatattgttcagggtcctcaccttcccactcattacttcctttatagaaccccagtcatccccctcaggaggcctgcgctccacaaatgaagttgggggtgaggggagctttagcatctcagtattgttcagatattggatacttgttgagctccactatgtgtgtgagaatgcgctgggctcaggatcaatagccataaatgagacagatatggcccatcccttgccatgcctaaactgatctgggcattgagacaagcagttaaaacccaacatagtaagtcctatgatgagacacaaactaagcatggctggaagggcagataagatttcacagaggaactgacatcttgactggcacacttagaagatgagtaggagtcagttgggccaagaggagaaaaagtgtgtttccatgaagaagaagagcatgtgccaagtcctgggggtgagaagcatggcatgtgtcaacagaaagacatgatcagagcttggatgggagttagagcggggagagaaggcaaggaaaaacataagagctttgcaaactgtgaaggcattgcatttagatgtcatttttagagcttggaggagcctcaggacattgaggcaggatagtggcctgatggcgtatgattttaggaaaaatcactgtggccaccctgtggggaaggattggcgggggaaggctggaggcaaagggtcctgcggtgggctgtggtaatgatctgggctggagaaggtatggtggtgcccagcgcaaaattggtttcgctttgaaaaataattagaaaatatttgttttgatctgtgtgcctgtggtgggaggtggggagggagggtcaagtgaggaaggagattgaatctagaataatgcccatgtttcaggcttcacgtgcagacatttcttggttcagctgggaagtgaataggaacagactggcgaggaaagaagacagtcgtcagttctgtctggggcacatccatcttgacgagtgtgagagagtcaagtcttgatggacaggggcaggtggacattcaggaaactcaggaaagagatttgatctgaagtgaccaccagaaaatactgacggaaaagaggtgacaaaaggagagacctgcaatattatattggctttctctcaggcaactgcttggcctgtctttatattccttttgaatctctgcatatgtacgggccattatttattttcacaactaacaaatgcagactttctgtgtaatgacaacaaagccaaaccagctgctaccaaaggagggaaaatcagaagagaaggaaaaagaacaagggaagcttggggaaaagctgaatgtgggtccttctgttgctgcaggggctggggtgggcccggtgattcctactgagaggcgttttctctccccgcttcctgtctttctggttccatctcattcacctcctgtcccctccacttcctgccagtcaaaccttagattcctccagaggctttttatttttatcttttgatgggcaagaaaatagtgcggattatttttccaaaccttcacctgaacatcacatcgtggctttggccctatgggcttggttcatccgggcctgcacagaaggacttttcgggccagtctggtcacatacatcgagtcctgtcttttcagttaaaaaaaaacacacacacacacactgctatgtttcactaagacaactggtgtgagttgttttttagaaaatcaactctacttcagtaagattttctcaagcattatcttgagaagaccagataataaaatttaaaaagaatttcttcttttttttttattatactttaagttttagggtacatgtgcacattgtgcaggttagttacatatgtatacatgtgccatgctggtgagctgcacccactaactcgtcatctagcattaggtatatctcccgatgctatcttaatgcaacttaaatcaattgctttaataacacatattgaccaagttacactcattaaggaaaaaaaactactttgttgtttttcttcttctgacgtgagctgaagacttagaaatagttgttaatagtgtttggttaataagaatttgttttaattgcatatatcaaatatgtatttattaaacttttctttttgtcagtttatcaattctagctttgtcacaaaaggtttgccgtatgaacatgattctgttgtacatctatttccatttttgttaagagacgaattcaattgtaaaaatctagtaccttttattcattaaacatgttagttcaggaatttcacttggttctacaaagatacatatctacagtggatggccagtgcaaacatgagactcagccaactggtctctgacccaattcagttctcctgtcttcttctggcttacaaagtaactggctctggggagaaagtgagtcaaagtaatatttggtttgaatggttattgactattttcttctgaaacttaatgtatactaattaattttttattttattcttttttttttagagatagggtctcgctctgttgtccatgctggagtgcagtggtgctatcacagctcactgcagccttgacctcctgggctcaagcgattctcctgtctcagcctcccgagtagctaggattacaggcatgtgccatcatgccaggctaatatttaattttttttttttgtagagacaagatattgttatgttgcccaggctggtctaaaactcctggtctcaaactatcctcccacctcagcttcctgaagtactggaattataggcatgagctgccacacctggccatatactcattttttgttaaaagctgaaatatatcagcatatactgcataaataccacaggagactaaacactgaaagtttctttagggtatcagaagaatacactttttgcttgcagttagcatctgcacagataagttttgtttctggttctattacttcttcagtttgaccctattaataaggacaattctaaaaataataactgtgtctggatatctgaatccgtgtgtggtcttttactgaagttacaggtttataactctgctgactagtttgctggtttctgttatgcaatagaagagtgcaaatgttaatttgatctgaagcccgtgtatacagtgacttttataatgtatatttaaagatggaaagccaagttttatgaggccagcatttcttgtcaagtcctcactccaccctcttctaattgggcctgacccttaagttgaataaagaacaaagagctctgtagttaaaacatttcactgcatgttgcatcttgcccttagtaaatggaaaaaaatagagacttaagcagagaatctgaactagggtgtgaaatatatattcagttttggggtgggagaatgagaaccatgttttacaatagtatacataacttccttagtctaaattcaggacatttccccaagatatgtaagaatttagacttatgcagacagactttataaaaacatgccaatatttattagtttgtgaattttaatattctgctccctataaaccagatttattttgagggataaagggatggaggtgacttctaaatcttagagcagaaacttcctgtgggcagctggacatatgtaccaggagctcagagaagagggttgtgttgggagcgtacattctgagtgatctgcatttggtgatgatggaagccatggacatgcactagattgtcttgtgggagaatatggagtagtaagagaagaagaagacctaggattgagccctgagcacctctggcttaatgttggatggaggaaattgaatctgtaaacaataccgggaggctgcagcctgagaggcagaaggaactggggtgtttgggattatggaagccaagggaaaaagcctgtctcacagcgggaagggaggtatcaacattgtaagctgcttcagataggttatgtaggatgtggactgaaaaatacctgtaaaatttggcaacgcgattcattggtaatcctagggaagttgcttttttggggtaactaaggtggaaaacagattggtgtgggttgagcaatgcaagagaggtgaagaaaaggagatttcatgtgcagacgtttctgagttcagctgggaacaagggataagatagaagatggaagttagagagcatgtggggcaagggagactcttttatgggacagtctcgcatgtgatcaaagccaatgagtaaggagcatttgagggagagagagtcaatcaacaagagagaaaagaaagagggttcatcataaaataacggtaacaacaacgaacatcttttgagtgttttctatatccggggaactatggtaaactcctaacctgcattctcacattcaattcttagaatcgttggatgtggtgggttccatgatttcctctagattagcgaggaggaaagagagatctagaaatgtcaggtagcttgctcagagttctccaggtagtcagtcatggactaatttgtgaactgaaggactgaacttcgtcaccacccagcccaccaagccggcttgactttaggtattctgtgctgcatgtgagtaccgacttaaattatattttaagaagggctactttgaaactctctctctgaaaactctatttctaaaagctctaccctcacaacaattttggcaagcagtcttggtaaaaccaaaccaaaccaaaccaaaaccaaaaaaccttatctgctgagaaaatataaccacataaaatatggtgctacaaaatatagactgtgtgaactgaaggtgacttgcccaaaggactcctgaagcaattggctgctgtagaaattaagtccacgggaggttttttgttctgtttttttttttttttttttgagatggattctcactctgttgcctaggctggagtgcagtggcgcaatctcggctcactgcaacctccgcctcccgggttcaagcgattctcctgcctcagcttcctgagtagctgggattacaggtgtacaccaccatacccaggttttttttgtatttttagtagagacggggtttcaccatgttggtcaggctggtcttgaactcctgacgtcgtgatccacctgcctcggcctcccaaagttctgggattacaggcatgagccaccgtgcccggcccatgagaggttttgtttgcacttcaagaaggacagaaaaaggcaggcaggctggggagcaacatagtaaggctgaggaagtgataggaaaacagcctccaaaaggtttccctgtagattctgactggctaagtttcctgaaataatattaattctgtcctcttgcttttaataggacataacgactatatgtgtccagccaccaaccagtgcaccattgataaaaacaggaggaagagctgccaggcctgccggctccgtaaatgctacgaagtgggaatgatgaaaggtggtaggtacatctctcccaggggcccttggggatggccctggccaccgcccagtgctggctctacccattggaataacaccatgggaattttgtgtttttttcttttaattgttttttttctattcttatttttctttgcaacaaaagtattttcataatccattttattttaaaaaggtggaagtgtctggaactggaaattctaacatggcattttgtgttttggattttcaatgtaaataattatattttaaatcaaaggtgtgtgggaggcggtgatggaaggaaacgaagagtgcttagtaaattattctagaaatatttttcagttactgtttatgttgcaaatgctagaaaatgatatctgaggataaactttccctaaattgagacttgtaaatgtgaaagctgagtagctaatttatagccttccagtctgttatcatcccttaaggaatgtgaatttcaatcaaaaggcagttttctcctttagaacctgagtgaaccagccactttcttaacctcagtgtctagcatggtgctggcatagttgattactgagcactacactaacaagtgtcagagcatgcatggtttgtgactgtgggtttgtgtttttgtggtctttgtggctgtgtgtgtgtgtggttttctgtcttctcatgtatccgatcttccagttttgtcatacaggaatctggaaactgaatcccagttctgggaatattaggagccccataaatgtggttgcctgattgacctcattgtattcttgggagtctcatcttgaggaacattgcttctagtcttggatagccttcagtgtagtggaagagaacaagtagaaaatgtgtaattaaaataaagtcatgaggctgaggtgggcagatcatctgaggtcaggagttcgagaccagcttggccaacaaggtgaaaccctgtctctattgaaaatacaaaaattagctgggtatggtggcgagtgccagtaggcccagctacttgggaggtggaggcaggagaatcacttgaacctggcaggtggagggggcagtgaactgagatggcgccactgcactccagcctgggtgatagagtgagactctgtctcaataaataaataaataaataaataaataaataaataaataaataaataaagtaacggattcatttagtgtttcagaaggatactgaagggagggaagggctgatgatggtgctacctgctgattgtaatagggaaaagcccgtttcttttctgaaggaggtgaagcttggggtgatttaaggagaacaaaatttcaatgaaaaggaatagtgattttgcaaatagtgggcagctaacctttaaatcattcttactgggacgcaggaggaaggagaggaaagaccaagaatggagattatgatgaagacaagcttgattgttaacaagcttacagtgacaggtttcatagtcccggggtcataaatacgccagacaggttgaggtttggaatgcagcatttggaataaattctcctggtgaagagatgcaatgttgaatttacgcattctgtgagctgtgactatgactatacatcttgaacatctgaaaaagcagctttaattcaaagggtaattaattccaagaatttaacagctacattcagaaaatgacacttgagtcatatggattaaatatttaaggaattcatctttctttgtactgttggagaattagtcaggcttaattaaacttacaaaatgcgtcttaaggtaacttggtaagtgacaggaatataacagctgcataagaaaagctttatttgaaacagtggagtcgaggtttaatattcttctttggcgattatatgtaggttaagcacaggctcttccatacattctccttgaaagctgaaataatcaagtcatgaatatgtccaaaacaatttttaaaatgtgaggggtacccatgcattgaccccatttcataaaaccgattctgtttttttttttgtaattaatatccagatacggtctggctgcatgaatataaattacgcattctcatttttaatctaacaaaaattcatatatgcaaagacataataaaagtctccccactgttttctcctaggaatctagataatttgactgtacacaacagactgtggatggctccatacacacttgcacatgtatattgatgactgtaaaatatatatctgtattagttttctagggctgccataatgaaataccacaggctgggtggcttaaacaacggaaattaattttctcccaattctggaagctggacatgcataatcaaagtgctggaatatttggtttctagtgagccctcccttttttttttttgagagatggagtcttgctctgttggccaggatggagtgcagtggcactatctcagctcactgaaaccttcacctcccaggttcaggcgattctcctgcttcaacttcccaagtagctgggactacaggtgtgtgccaccatacccagctaatttttgtgttttttttttttgtagagacggagtttcactctatgttggccaggctggtcttgaactcttgacctcaggtgatccgcccacctcggcttcctaaagtgctgggattataggcgtgagccaccatgcccggcctgtgaggcctctcttctaggcttgtggctagccgtcttctgcctgtgtcctcacatggcctttcctctgcgtccgagcactcttggtatctctttctcttctcacaagccctgttggattaggagtccacccttatgacctcatttaaccttagttaccgccaaaaaggccctatttccaaatatagtcataccaggggctagggcttcaacatacaagttttgtggggacacagttcataacaggctgccctcccaaaataccatagactgggtggcttaagtaacggaagtcaattgcctcatagctctggaggctgaagtctgagactaaggtgttggcaggtttgatttttcccgaggcctctctccttggcttgaagatggctgccttctctctgtgtccccacatggccttttctcggggcatccacagcttcttcttcttcttacgaagacaccagtcatatcggattagggccccacacacaggacctcattgaatcttaatcacctcacttaaggtacaatttccaaatacagtcacattctgaggcccagggggtaagatttcaacatatgagttttaagggtacacaattcagtatgtggcaatatcccataggggttactcagtgattgttcagtatttctttacatgtaaggaaaacatgtatctttctggcagtttttatatgtacataagttttaaatgaagctttaaattcataaaattatagcccgtgagaacatcttattttaatgatatgtataaagtacttgccataaatcaatataatttattgtattttctacaacatggaataccacacatggccacaggataccctctataacaactccttgaaaaatcccattgaataaagccttaatttacaactggaagtacaatgataactaactataaaatgtgcagtcacatggcaaaggccagctgtgactgaataaatctttacaacatgttttcaaccattagggttcacaacaatccactttcttaaccaggctggttaccaactaggatattgaaactctacctatgaaataaaaagtttagtttcagttaaaagagaaccacagacctactccctattttcatagcaaggctgaaaaaattcactgaagatctattgtaaagatccaaaagagtgcatgatttgtctccatgaactaacaattttaatctgttataatacttactgcctctgaaaatcccagcatcattattagatttggttctgaatcatggtagttctataagatgcaggatttgaattgcactttcgggaatgtgcttttctatcctagtacatgtgctggtttctctgcattgctttttcctcttcatttgtctccttcctcttgaactttaggttgtagattacatgtctcttcttcaggaaggcctacacagttacctgacagttcctgaggctcgaagttcaaaatcaaggtgctggaaaattcatgttctagctttaatggcaaacagctcttctcttagctcttatcaccattattattagtcattcaatgtctgtctttacatatggtccataaactccatgatggcgcgggggtggggggtctctgtgtcttgtttaccgatcttgcatgaaacaagtcacaaggtaggtgttcaagaagtatttttttgcactaattaatgaattgattcaattcatttaaatagttatttgtgtagggcttcttatatgcaaacccttgggaataaagcaaatatgaataagattgtagtcccttccctcaatgtcctcacagtataaagagaacatttgcatgggaagcggcaaataaaaatctcaacggcaagtggagactgggttgcaagatggctcaaatattgaatgatcagaatgggagtctagagctttaaacaaccactcccaggtttagtccaactcagagtattactcagacacctgacatccaagacatatattattactcaagaatgtggcctttttgctgagtttggtagaaagaggaactcttccaaagataaatgtgttcaaatgctggctcctcctcaaacttgctgaacaaccttgttaaagtcacttttatgagcttcactaatttcaaatatgaaatggagataaataaattttattgtccaagcacggtggcttacgcctgtaatcccagcactttgggaggctgaggtgggcggatcacctgaggtcaggagttcaagaccagcctggccaacaaggtgaaacctcgtctctacaaaattagccaggtgtgatggcagaagcctgtaatcccagctactcaggaggaggaggcaggagaatcacttgaacccagtaggcacaggttgcagtgagccgagattgcaccactgcattccagcctgggcaacagagtgagactctgtctcaaaaataaatatataaataaacaaataaataaattttacttaatgagtttgtcatgaagatgacaaatcgtaacatgggaaaatataaatctaaagtgccacacaagtgttagctattacatatcttttttgtcttaaaaataattactatcttagttaaaaatttcatcatatacgagcactgctgggttttttttttcagctgaaagaaagagaatggcaatttcatcacttctacaagatataaatttctaatttctttgtggagaataaaaacttggcttaaacacctaagcttttttttcttttctgatctcatatgctgaatatagctgaatgacaagtgagatgtgttatttatcattttatgatgccagagatttacacgaatttgtgaaaggttttttcttaccatagattcagaggcgtgtttgaggcaaggttttcattgtgcagtgaggaaattggcacatagaaatcaattgatgtgcaggactcttggactgactattctggttatgtttccttataacacattaagaagaaatttgagataaagtagtaattgtcaactagtctttatttattttaataacaaatgttgcagtataatttttagaaatattccaaaataacaaataaatccaaaaattaacgggataattttaaagtgagaaaataacatactactaatatagacagggaaatatacatgtgtccagaatgattcagaagcccaatgaaacactggaaaataaaatattttcctgttgcttgggtttaatatttatcactatgagttatcgtaatttgctttattgatggataaactcccaacctggggactgcgattggaatcctctttaatcctacattggctatcctttatcaaaagtaaacaaccggctggccatggtggctcacacctgtaatcccagcattttgggaggccgaggcgggtggatcacctgagatcaggagtttgagaccagcctgaccaacatggtataacctcgtctctactaaggatacaaaaattagctgggtgtagttgtgcccacctgtaatcccagctatttgggagcctgaggcaggagaattgcttgaactcaggagacggaggttgcagtaggccaaaatcacaccactgcactccagcctgggtgacggaatgagactccatctcaaaaaaaaaaaaaaaagtatacaaccaattattaatgttcatgatggtagaatcaaattaataaattaaaaatgtagatgtgaattactttttttggattgccgaataattgtggaagatttgtagctgcatgtgaatccaagtttcctcaaaaggtaggttggggtgctcctatttaggattgaatttaagaaaaatgttaaagaaaagctagctgctctttaccaaagagagactggttgttttaagcagtaatctaatctatatatttatgatattgaaactattattttattaattcatataatagatatttattaaaaactccccatattataattttttatttgcaaacaaatatactgaatcaagtaagtgaatcacatatggaccttaaagactaatgaatccaatgtttgacagtattttatatcaatcaagctctggtttccacaagcagaagcagatcgtcatctatgaaacagataaaagttgatttggcataccctctctttattcattatgatgttcatgagaaaccttcttagaaccctagggctccaaggaacacagtttgcaagccactgatctaatctaactccttcatcctctaggtatgaaaatcaaggccctccattacctattagggatgaaggcaggtcagcctctgtgactgtcagttcagctggaggaagcatgagtgtaggcagcacaacaatccctataaggaccatgttcttaagctggttttttttttcctagtagtttttacagtttcaggtctaacatttaagtctttaatccaggttgagttgatttttgtatacggcatgagataagtgtccaatttcattgttcggtgtgtagatatccagtttctctagaaacatttatcaaagaaactgtcctttctccattgtgtgcttttagcagctttgtcaaaaattaattggctctaaatgaatgaatttatttctgggttctctattctgttccattggtcaatacatgctgttttaattactatagctttatagtatattttgagtcaggtagtgttatgcctctagctttgttcttctagctccagattgttttggctattcagggtttttttgtggttccatacaaatttttggattgtttttccacttttgtaaaaaatgtcattgcaattttgataggcattgcattgaatctgtagattgatttgtgtcatatggatatttttaacaatattaattcttccagtctatgtatggtatatctttccatttatttgtgtcttcttcagtttcttttattgatgtctatagcttttagcatacaattctttcacttccttggttaaatttattcccaaatattttgttttatttttatagctattataaatgaaatttcttcttgatttctttttttggatagtttgctgttagtgtatagaaacactactgatttctgtatgttgattttctcttctgaaactttactgaatttgtttattagttctaatagttttttgtgtggagtctatacttacatgatctatgtgtaagatcatgtcatcagcaaacacgggcaatttaacttcttctttttcaatttgcatgcctttattttttttcttgcataattgctctggcaggaactctcagtactatgttgaatagaagtggtgagagtgggcatccttgtcttgttattgatcttaggggaagacttttcaaattttcaccattgagtatgatgttagctgtaggcttgtcatatatggcctttattgtgttgaggtacactctttctatatttaatttgttgagagtttttgatatgaaaggattttgaattttgtcaaatgcattttttcctctattgagatgattgtatggtttttgtccttcattctgttaatgtgtgtaccatagttatagatttgcatatgttgaaccatcgttgcatccctgggcaaatcccactcgatcatggtgaatgattctttttcatgtcatgacaatcaattttgctagtattttgttgtggatttttgcatctatattcatcagggatattggcatgacatttaattttcttgtaatacccttgtctggctttagtatcacagtaatgctggccttgtaaaatgagtttggaagtattccctcctcttcaatttttgggaagagtttgaggattggtattagttctttaaatatttggtagagttcagcaataaagcccattaggtcctgggcttttcttccatagaggactttttattgctgattcagtcttctttctagctattggtctggtcagactttctatttcttcatgattcagacttgctaggtttatgtgtctaagactttatccatttattccaagttatccaagttgttggtgtgtaattcatcatagtactcttataattttttgcatttctgtgctatcagttgtaatgtctcctcttttatttctgattcagtttatttgtgtcttctcactttttttcttagtctagttaaaggttaatcaattttgtttatctttttaaaaacaaattcgtagtttcactgatcttttgttttgtgtttttagtctcaattttatttatttttcctccgatctttattattttcttccttctactaacttggggcttagtttatttttatttttctagttatttgtggtataacattagattgtttgagatcttcttctttgatgaagacatttattgctataaacttccctcttgaaaatactcttgctgcatcccacaaattttggtatgttgtgtgtccattttcatttgtttcaagatatttttcaacttttctttttatttcttctttgacccactggttggttctgagtatgttgttttattttcaagtatttgtgaattttccaaaattattcttgttgatttatagtttcatattatttatggttggaaaaaatacttgatatggtgtcaatgttcttaaatttattaagacttattttgtgtcctaacatatgaactatactgttttttttctttttttttttttgagacagagtctcactgtgttgcccaggctggagtgcactggctcaatcttggttgactgcaacctccgcctcctgggttcaagctattctcatacctcagcctcccgagcagctgggaatacaggagcacaccgccatgcctggctaactttttgtattttttagtagagatggggtttcaccatttgggtcaggctgctctcaaactcctgacttcaaatgatctgcccaccttagcctcccaaagtgctgggattacaggagtgagccaccgtgccaggccatgatctatactgttttatctaacattcagtggataatgttccatgtgtatttgagaagaatgtgtgttctgttgctgttggatgaaatattctgtatgtatctgttaagtccatctgtgctaaagtatagtttaagtttgaactttcattattgattttctgtccgaataatctgtccattgctaaaagtggggtactgagttccccaatattattgtattacagtctatcttccctttcatatcaattaatatttgtttcattcatttaggtactccaatgttgggtgcatatgtatgttcacctgttatatcctcttaatgaattgaccctcttgtcattatttaatggccttctttgtcttattttatagtttgtgacttaaagcctattttatttgatataaatatagctgtctctgctttcttttggcttctattttcatagaatgccttttttggtcccttcgccttcattctctgtgttttcttaaccatgcattgaatctcttctagacatcatataacagggtcttgtttttttaaatccatttactcactgtatctctttcttcctatcttgctgtcttcctttgtgattaggcgattttctatagtggtatcctttgaattcttactttttgccttttgtatatttgctacaggattttgctttgtgattaccataaggcttacataaaagatcttatagttataccaggctatgttcaactgtttataacataactttgattaattttttaatactcaatttatttgattgcttatttagagataattttgattcctatcagaagaaaactgaggtatctttatgtaccttttcaggaatgaccacgtctcaccttaccttgaatgttacaagaaatgctggcagtgactcaaggccaggcaaaaatttcagaaagggtttatcttgtttgtacaattttcttttgcaaaaataaatgattcttgatatgatgtaaggactttttccgtagatagaacctataaaatgcagaactttggggcagtaattatatgaatgaattgctactttaaaattctgtaagtccccaggaatttccatatgcttttttttgtttgtttcagtggttgtgatcaggctaatgggtagtttttagagctgaaaagaacttaaagatcatctagtgcacctttttgtttttcagttggattgttcttgtccaaatcactaagctaagttaactgctcagacaggaaaccaagtctcctgacccatggtttaatgctcctttcattgttatgcgtctgcctggctgacctgttagtaacataaagtgtcatgagagatagacatatgcatgagtaagatattaatatcccataaaccaaaactgtgacttaggaaatgttacggtgggcacaggatattactcctcttcaacaaaaacatcaatcatatgttggcttagttgcacagcagaagtaccaaaataaatttatatagacggtgtcacagatactttaaaaagacctacttaagatttaattacctaatattatttaatatttaatataatttaaaaggggcatttttatctttcagccaaggttttaattgtttttagataattctatttttgaaagtctgattttgttttaaaatgcccattctggtatataaaaacatcattttgtcaaataggagtcccagctaagggccaagcgtgcaattaaacttgactctttacctactacctaggaaccttgggcagatcacatactttttcttcactcagtttttacttctgaaaaatgccagctgaagtatgtttcaaatcttaaattttatgttttatgatctaagttcagattaacaatggaatggttagaatccaaagctaaaggtagtatatacaagtgtatattgggggttgggagcaactgccgcagctatcatatttacatttcaagctcaatttagaacaactgcgggcaactgtaaaaaccggtaggaatgggcagagttattgtcttcactagtcattgtggaaagtgaatctcttctgaatggagagtcacaaaaatgagtttgatgctttcatgatagtgaaatgagaagatggccatatattgctataaatcaccagcaacataaaagaaaaaattcaaaaatcaagtttgttgaggcaggactctgaaaagataactaagcttttttttttttttttttctgttagagatgtaataatcatgactaagactggaatcccaagagctggtgagactttctagtttctgccttgtggaaagagaaaggaagaggccaaaaaagataatgaattttggaaagttcctgattaaatatcgcataggctagtctggttatgtctgcttgaaaacttatccagtaggtataaaccaacacacttgaggccagtctttttggaaattacagaaatatatgtcagccttaagagacatcctatgatgaagagcagagggagttgtttataaagaaatgttctcattggctgggcatgatggctcacgcctgtaatcccagcactttgggaggccgagctgggtggatcacttgagatcagaagttccagagcagcctggctaacatggtgaaaccccgtctctactaaaaatataaaaaaattagccgggcatggtggcgggcgcctgtagtcgcagctactcgggatactgaggcaggagaatggcgtgaacctgggaggcggagcttgcagtgagccaagatcgtgccactgcactccagactgggcgacagagcaagactctgtctcaaaaaaaaattagccaggcatggcggggagcgcctgtaatcccagctactcaggaggctgaggcagggaaattgcttgaacccaggaggtggaggttacagtgagttaagatggcaccattgcactccagcctgggtaacagagctagactccatctcaaaaaaagaaaagaaatgttctggtcatgcctggagataatacatggtttagtttatgcttgattcagcaaataaaaattggtgaggaacatacagaattatatttaggtgattatattttttatattttatatataaaatttatattttttatattttaggtgattatatttttaaacgcttgctttacaagactaatcattattacttttttaagttttgtgatatattttatttaactaatataccccaaatagtatttcaatacagaatcaacatttaaaaattattgatacattatgtatgtttttttccttcactaagacttccaaatcctccaagtgtttcacacttacatcttattttggaccagccagattttagtgctcatttgaccatgtgatctgtgcttaaggaggctgctggagctgaggctgggctgcagtaccaacatagaagtctttatctgtcaaaccaggagtttgagatccctgagggatatgggaaccataaaggatcttaagcagagaagtgactttcttaattttgaacctatcctggtgttctcatagattagaggagagagatttaggagtgagggatcaagcaagaaggtggctccacattgttttccatagtagttgtactagtttacattcccaccagcagtatagaaatgttcgcttttcactacatccacaccaacgtctattattttttgattttttgaaaatggccattcttgtgggagtaaggtggtattgcattgtggttttgagttgcatttccctgatctttggtgatgttgagtattttttcatatgtttgttggccactttgtatcttcttttgagaactgtctattcatgtccttagcccactttttgatgggattgtttgttttttttcttgctaatttgtttgagttccttgtagattctggatcttaatcctttgttagatgtatagattatgtctccttctctgtgggttgtttgtttactctgctgctgctccttttgtgcaaaagctctttagtttaactaagtcccacttatttatctttgtttttgttgcatttgcttttgggtttttggtcataaaatccttgcctaagcccatgtctagaagggtttttctgacgttaacttctagaattttatggttccaggtcttagatttaagtccttgatccatcttgagttgatttttgtgtaaagtgagagatgaagatccagttgcattctcctacatgtggtttggcaattatcccagtaccatttgttgaatagggtgtcctttccccactttatgtttttgttggctttggcaaagagcagttggctgtaagtatttgggtttatttctcggttctctactctgttcctttggtctacatgcctatttttataccagtaccatgctgtttcggtgactatggccttatagtatagtttgaaatcaggtaatgtgatgcctccagatttgttctttttgcttagtcttactttggctatgtgggctcttttttggttccatattaattttaggattttttttctagttctgtgaagaatgatggtggtattttgatgggaattgcattgaagttgtagattgcttttggcagtatgatcattttcacaatattgattctactcatccatgagcatgagatgtgtttccatttgtttgtgtcatctatgatttatttctttgagaggtgttttgtagttttctttgtagaggtccttcaccttcttggttagtttttgttttttttggtttttttttttttttgcaactattgtgaaaaggagtgagttcttgatttgattctcaccttggttgctgctgttggtgtatagcagagctactgatttgtgtacattaattttgtatcctgaaactctgctgaattcattaatcagttctaggagctttttgggggagtctttagggttttctagttataaaatcatatcatcagcaaacagcgacagtttgaattcctctttactaatttggatgtcctttatttctttctcttgtctgctccggctaggacttctggtactgtgttgaatagtgagagtgggcatctttgttttgttccagttctcagaggaaatgctttcaacttttccccattcagtattatgttggctgtgggtttatcatagatgccttttattacagtgaggtaccttgtataccgattttgctgaaggttttaatcataaagggatgctggattttgtcaaatgctttttctgtatctattgcgattattgcgatggtcatgcgatttttgtttttaattttgttcaggtggtgtgtcacatttattgacttgcatatgttaaaccatccctgcatccctggtatgaaacccacttgatcattgtggattatctttttgatatgctgtttgatttggttagctagtatttcgttaaggatatttttttgagatggagttttgctcttgttgcccaggctggagtgtagtggcactgcaacttccactttctggtttccagcgattctcctgcctcagctccctgagtcgctaggattacaggcacctgccaccacacccagctaatttttgtatttttagtagagatagggtttcgctatgttggccaggcgggtcttgaactcctgacctcgtgatccacctgccttggcctctcaaaggactctcaaagtgttgggattacaggcgtgagccacagcgcccggccagatttttgcatctatgttcattaggaatattggcctgtaggtttctttttttgttttgttctttcttggttttggtacaagggtgatactggcttcatcgaatgatttagggaggattccctctttcttcatcttgtggaatagtgtcaataggattggtaccaattcttctttgagtgtctggtagaattcagctgtgaattcatctggtcctggactttttgtgttgttggtaatttttaaattaccatttcaatcttgctgcttgttattggcctgttcaggatttctaattcttcctgacttaagctaggaggtttgtatctttccaggaatttacctatctcttctaggttttctagtttatgtgtgtaaaggtgttcatagtagccttgaatgatcttttgtatttctgtggggttggttgtaatatctcctgtttgtttctaattgagcttatttggaccttctctcttcttttcttggttaatcttgctaatggtctatcaatttcatttatcttttcaaataaccagcttctttttgtttcatttatcttttgtatttttttttcaatttcctttagctctgctctgatcttggtattttctttcttctgctggctttgggtttcgtttgtttttatttctgtagttccttgatttgtgaccttagattgtctatttgtgctctttcagagtttttgagtaggcatttaaggctgtgaactttcctcttcgcattgcttttgctgtatcccagaggtttggatggttgtgtcactattattgttcaattcgaagaattttaaaattttcatcttgatttcattgttgacccaatgatcattcaggagcaggttatttcacttccatgtatttgcatgttttggaaggttccttttggagtcgatttccagttttattccactgtggactgagagagtagttgacatagttttaattttcttagtttttttgacacttgtttgtggcatatcatatggtctatcctagagaaagttgcatacgctgatgaatagaatgtatattctgtggttgttgggtagaatgttatgtaaagatctgttaagtccatttgttccagggtacaatttaaatccattgtttctttgttgactttctgtcttgatgacctgtctagtattgtcagtggagtattgaagtcccccactattattgtattgctgtctgtctcattacttaggtgtagtagtaattgttctatacatttgggagttccagtgttaggtgcatatatatttaggattatggtattttccttttggacaaggccttttatcattatataatgctcttctttgtcttttttaactgctgttgttttaaagtttgttttgtctgatataagaatagctactcctacttgcttttggtgtccatttgcatggaatgtctttttccacacccttaccttaagtttatgtgagtccttatgtgttaggtgagtttcttgaaggcagcagatacttggttggtgattgcttatccattctgcaattctgtatcttttaagtggagcatttaggctatttaaattcaatgttagtattgagatgtgaggtactattctgttcatcatgccatttgttgcctgtataccttggattttttttagtagtatttttgttttatacctccaatgagatttacacattaaggaggttctgttttgatgtgtttccagcatttgtttcaagatttggagctccttttagcagttcgtgtagtcatgtagtgctggcttggtagtggcgaattctcttagcgttgtttttatctgaaaaagactgtatctgtccttcatttaagaagcttagttttgctggatacaaaattcttggctgctaattgttttctttaaagaagctgaagatagggccccaatcccttctagtttatagggtttctgctgagaaatctgttaacttgatgggttttcctttataggttacctggtgcttttgcctcacagctcttaagattatttttcttatcttaactttagataaccttatgacaatgtgcctaggcaatgatctttttgtgatgaatttttcaggtgttatttgagcttcttgtatttggatgtctaggtctctaataaggctaaggaagttttcctcaattatccccccagatatgttttccaaacttttagatttctcttctttctcaggaacaccaattattcttaggtttggttgtttaattctgtcccaaacttcttggaggttttgttcatttttttttttttttcttttcttttttttttttaattgatcattcttgggtgtttctcgcagagggggatttggcaggatcacaggacaatagtggagggaaggtcagcagataaacaagtgcacaaaggtctctggttttcctaggcagaggaccctgcggccttctgcagtttttgtgtccctgggtacttgagattagggagtggtgatgactcttaacgagcatgctgccttcaagcatctgtttaacaaagcacatcttgcaccgcccttaatccattcaaccctgagtggatacaccacatgtttcagagagcacagggttgggggtaaggtcacagatcaacaggatcccaaggcagaagaatttttcttagtacagaacaaaatgaaaagtctcccacgtctacctctttctacacagacacggcaaccatccgatttctcaatcttttccccacctttcccccctttctattccacaaaactgccattgtcatcatggcccgttctcaatgagctgttgggcacacctcccagacggggtggtggccgggcagagcggctcctcacttcccagtaggggcggccgggcagaggcgcccctcacctcccggacggggcggctggccgggcggggggctgaacccccacctccctcccggacggggcggctggccgggtggggggctgacccccccacctccctcccggacggggcggctggccgggcggggggctgacccccccgcctccctcccggacggggcggctggccgggcagaggggctcctcacttcccagtaggggcagctgggcagaggcgcccctcacctcccggactgggcagctggccaggcggggggctgaacccccacctccctcccggacggggcggctggccgggcggggggctgacccccccacctccctcccggacggggcggctggccaggcggggggctgacccccccacctccttcccggacggggcggctggccgggcagaggggctcctcacttcccagtaggggcggctgggcagaggcgcccctcacctcccggactgggcagctggccaggcggggggctgacccccccacctccctcccggacggggcggctggccgggcggggggctgacccccccacctccctcccggacggggcggctggccgggcggggagctgacccccccacctccctcccggacggggtggctgccgggcggagacgctcctcacttcccagacggggtggctgccgggctgaggggctcctcacttctcagacagggcggttgccaggcagagggtctcctcacttctcagacggggcggcccggcagagacgctcctcacatcccagacggggcggcagggcagaggcgctccccacatctcagacgatgggcggcagggcagagacgctcctcacttcctagatgggatggcggccgggaagaggcgctcctcacttcctagatgggatggcggctgggcagagacactcctcactttccagactgggcagccaggcagaggggctcctcacatcccagacgatggcggccaggcagagacgctcctcacttcccagacggggtggccccgggcagaggctgcaatctcggcactttgggaggccaaggcaggctgctgggaggtggaggttgtagcgagctgagatcacgccactgcactccagcctgggcaccattgagcactgagtgcggttttgttcattttttaaattcttttttctttgtctttgttggattgagttaatttgaaaaccttgtctttgagctctgaagttctttcttatgcttgttttattctattgctgagactttcaagaacattttgcatttctctaagtgtgtccttcatttcctgaagttgtgattgttttttatttatactaactatttcactgaagatttctcccctcatttcttgtatcatttttttgacttccttaaattggacttcacctttctctggtgcctccttaattagcttaacaatcgaccttctgaattctttttcaggtgactcagggatttcttcttggcttggatccattgctggtgagctagtgtgattttttgaggggtattaaagaaccttgttttgtcgtattactgggattgtttttctggttccttctcatttggtaggctatgtctgagggaagtactagggctcaaggctgctgttcagattcttttgtcccacaggttgttttcttgatgtagtactctcccccttttcttagagatgtggcttcctgggaaccgacctgtagtgactgttatttctcttctggatctagccattcagcagggctaccaggctccaggctagtactgggggctgtctgctcagagtcctgtgctatgggctgttttcaggtctcacagcgttggattccagcacctgctctgatagaggtggcaggggagtgaaatggactctgcaggggtccttagcttttgttgtttaatgcactatttttgtgctggttggcctcctgccaggaggtggcactttcaagacagcgtcagctgtggtagtatagggaggatcaggcagtggccagggccttagaactcccaagagtatatgacctttgccttcagctaccaggatggatagggaatgaccatcaggtggggcaaggctaggactgtctgagctcagactctcctcgggtgagtcttgctgaggctgtgctgtggggcaggggggtgaggttcccaggtcaatggagttatgttcccagaggattatggctgcctctgctgcgtcatgcaggctgtcaggaatgtgggggaaagccggcagttacaggcctcacccagctcccttgcaacccccaaaaccggtctcactcctgtgccctaccaacagcatcaagtttgtttgcaggcagcggatgagcaaggctaagaacttgccgcaggctaccagcctcccagcaaagaatgtaagtagggctttcatgcctcccttcctgttgaatctgtacaccaaattcactccctcccccaagttctggccaggtgacttcatgtttggttggaattgttacaaagttcagctggaggtttccttctcgctgtggtcttttcccagttcctctggccaccctccccaaggacccctgtgagacaaggtagaaatggcttattaggggacccagagagcccacagggcttttccccttgctttctctaccctttatttcactcagctgtctaattaaatcagctccaggtaagttcatatccttctcccatgatctggagctgcagattccccagtgagggtgtgtgttcgggggtgggctatccccctttcctactttcacagcttgggcactcacagtatttggggtgtctcctgggtcctgtaggagcaaactgcttccttcacagggtctgtggattctcttggctttcctggtatattcctgtagtagttctggagcagaagtttatggtgtgagtttccacacactgctctgttcatccaagtgagagctgcaatctagtcctgcctcctttccaccattttttggccttgacgtattacatttattttatgtttgaagttttggcagttttattttgaaaattttacataacaaatgccaagccaaatccaaacttcttggcctaaatcatttacagataacctttactgagcatttactacatgaaggtgttgttgacacaggggatttaagatgtgatcactgaccacaacatccaggcaacctaaaagtgaaaagaggtcattcacaaaaaataggaccaaacttcctccattcctcaagggacctaggactggagttggcctaaaaattcctgctgtatcacctcacccaccagttttgatcttgctctcagggatcaaggaagctcaaggtttctggcccttttggctcatgttcttggaggtatattctattgtcaagttaaagtcgtacccatcctagatctgtttctctctctttgtggttccagtctcatagaaaacataactatgtgaaaacaccaactaccccataaagctattctgagactcaaagacatgaactctattttgataatcacaaattgatgtatagatgtcagatatcattcatgtattatgtagcattgtggtttaagtcttagctgttggaatcagactacttgcattcaaattttagctctgttgataggtgtgtaaccttgaacaagatacgtaacctcttcagacctttgtctctttgtttgtcaaataacgacaataataatactaacttagtaagtatgtataaggaggcatgtaaagcttctattgtatttggcttatggtgagcccttcatataaattggttacaatgggtaatgaaaagtacgttcaatttttcccacaaggatttaatctaatctctaaataaaatgccagttttagtatactgtcatcattataaggaaactataattcttaagtaattaattactttggttccctttggataattagtgatacataaaatgcagtaccttgccctgaggaacctacaagttagcctccctctaatcctggcattcaaagtcctccaccttccgaattacacctgttttttcaggcattgtctcccactttcctagcaagcctttggctccaggaaactgttctgttcattgacgacagaatgtattttgtcccgtatgcctcccttcaatctgaagttcatttttagtaattttttttattagtagtgactttccccatttactaatgcctttctctttagctcatttagaattccctggaagtcatcatgttttccttctgaattgctatcatattctgtctctgtgtctaatcagaaagttaggtgagctgctgtctcagctcctgtgttaatccaggtactgagctctttgtaccctgccagcttgagggcaacttggatgcgctggtgtgtagtgatttgcaactgtgagagagccgtttccatcaacaagtgacagcttttggttctaaacactgcttgacctcattctggtttgaacatatactttggcctctgccctctacctcacctccagttctgatcttgggcatgccacagaaccccatctacactaggctttcattttggacttctaagtcctttacttgaccacttattttctttaattgctagacttaatcatccatgcatatgacagccactcagctctgaccccaatacttcattgaggctcatgccagtctgacctctcacagggaagagcacccctgccggtgagcccctggcccttggattatgctgtcccaccagtgcccagctggctgcttggcactgcatgtgatgtatctttgtttattgatcgcttaattgaatgggatataggattatattccatgttccagatcaagttgagccaagctgacaacttagtattaaaaaaatatatttatctcctatctgtccaattaaaattttaatttctagaggtagagacagtcacattgctatttaattcctagcacagcagtatttttgtcaatatttgttattagtggtgagtttaaattataaaggaaaaaagagaagtggtgatttatgtcagcgcttggctaaactattcccttgatataagtctattattcaggtcacataagcatgactgaagtaatatcacaaccataatatcataattatctctcttgctgtctctgtcactttctcacttttgtttgtgcatagtgcatagacctgtagaaaatttattagtaatctgaagcataaaaccaaatattacaactatcataacaaataaataaaactgtgcactcctttagggagtagtaaagccatttctaaaattaagtcaaagtaagattcccttattattgagatattttagtggtatacactatcataagtaagatgaataattttgttagcagctgacactgctatatagatatttatcttgggaagttctcagtgtaacatctttactgtgtttttctctttagattatacttttatgtttattattttgtttcgtgggggattcaaaaatatgcattttatgccatacttggggattccctataaattattagttgtaatatgacagttccatcatgaattttccaggtattcttttatgcaagcagataatagctcattttggtttttaacacattcatgcatattctttctctctcaataaatatggttttaatttattaaatgaaagatttaaaaatgtgctaagcattttaataataatcgattttggattaacttgttatgtttactctagggctgtagttcaccatttattcagttaagtccttccccaaattcaatattgaacatgtggaattgattcgtttcacgtggatgtatcatttactcccaagatgttggtttttggcatttagtactggtaatgggccaggaaagtgctcatctatatttgttgttattcactgattgcatcttgcccttgcacccactgagacgatgggaaagtagcaacaatactaggtgatttctttgatttaaacccaattaaaagaattagagagttgtctgatacaaggccaaagaactaagaacagaaacaaaagcaaaacaacaaacagcagcacaaactccagtgagataaatttttaaaacattgggaatatttaaaaaataaaaacactccaatgaaccacccaggttttattaaagagtagagaactcaaacagcagaaggcagagctggtggaggaaactcagcaactgctcagaaatgaaacaacctaggaaggaggtgcgagtgacctgaaactccttttaaaaacagaaaggacaaaaagaggtatgggctgacaaaaggaaagtggtagattactgatgtattgcattatgcttagaatgtctcagaatgcgagaggcagtaaacacaccagaagaggatacaatatccggaccatgtgcaactgcaaataaatgtttgggttaaaacttggttgattctaaattacatgaagagctgatgataattgaggcagaactgatagacctaacaatagaaaaaaatcgatttaaattcagagaagaggtcatttaagaaagtataatgaagccacttaataaaaggaaatattcctctaactaaagtttgagatttagggcataatcctcaaagacaggctaatataatctattttttgattaaaaaaaggaacttttggtttaaagtaagatgttcagctgctcttagagtttatttctccatatttgggcatataagaatttaaggaaaaatatagaaatataagaaagatttcatgagaatcacaagcatagtttataggcaagatagccttttctgtttgaaagcgaaaaatactatttcaacatgtaaaaacctaagtcagttttcactggcatgtcccacaatcatgcctgaaataatggttgaagacagatgtgagacatttcaagggcaatagattaatacatgaaacccacttatgcctagcgttccattattggaacgctaagcatgtgggagttatttatatcctattgctcaaggtcatctccaaggtctgagttttcactcatgcaaaaattcaaaaaattgcaacctcggcgtaaatgggttaacaaaaagttaatgctggacagtaaaataaactactaaattagacacaccatattttttaaattataagagattaagaactatgagatatttaaaaagccacccacagaagtagtaggacaggtagagaaggataaattctaacaatcaactgtatctccaccccaccttgtaaatgacaaattagtttacttagtcaattcaggaaattaaacgtatacattttgtgttaaaacagaagactttttttaaaaaagtgtgttagttaaggttaattttgacctagttaagaaaaagcagtttagagtcttgaaatggaaatgagaaatacataattacccttaaaaataagttgatagtgaattttatctaggattcttaagacatttttaatatttaatgaaaatgaactacacaattattaaaaaatagttgcctgggtttagaaaaatgatcccttaataagacatatacaacagcctgaatttttatttccaaatactatagcaacaaaataccggcaagaaaaatgcacagaaacattggatagtctcttcttactaatcttttacagatatttatatattctgaattctaacttttaatttattttatgtattataaatgtcatctagtatgcagcttgactttgctttatggtatcatctgtttcacagaaaattttaagttgtggaatttatcgtattttttctttatagtttgtgctttaagacctgtctaataaatctttccttccctggacgctataaagttatttgtctatattctgttaaaaggaataaaactttgctttttttcacattttgttacttatttcacctgaaagagaattttgtttattatgtgaggtaggaatataacttaatttttttccattgaataaccaaattgtcccagagcaattaagcaatacattctttccctgttgatctgtgaagctacctccattaggcatgaagttgtcctgttgaagagaatctgattctgagctctcttcactatttctttatttgtctatgtctacactaaaagcaatttaatttctgtgtctttataattactttgactttataatccttgaaagggactttgttcttcttcaaaattgttttggctatttatggctacttttgctttcaaatgagtttttaaatcaaactttaatgagattgcattaaacttataaattaatctgaggaggattgacatcttcatgatatttagtcttcctacccattaacattatataactctccatttattttaggtctttttgaatgacttctaataaagtttttcaattttctccaaaatatcttacatattaaaatttactcatagctgtctcatcttactgatattttaaagacatatctttttaaaaattatattattaaattgtttcaggtatgtctttttttttgaagttttacaaatttgggattatactgcctcttcattcaacattttcccatgctgttggggatccttcaagtcaaaattattagaggagctgcattaatattccagcatggacatactataatttatttaattatttcccgaattgtatgtttttgtttctaacttcacagttttcaacatgactgggaacagcttttcttgctaaatccttgcacgccacagtaattatctcactgggccaaaagataggtactttttcatgactttcgccatatattgtcaaaatggaaccaatggtgatttgttcagaaatcatggtacatcatataaaaagattactctgcaagcatcacaaactgtgatatatagaaatgtgtttattgacatgaaatagatcatgaagaaagtgattacaaatggtatttaagcattttaagttatataggcttatactgagcaataacaaagagggtgaataaatgaatgaatatgtgattctggaagggtatgtaacaaaaggttaacaatggttagccctgggtaaggggattatgtatgacttttatttccttctttttttcttcctttccccttatgtttttaacaatgtacatgaatcgtttatgaataaaataaaaaactttgatattcttatataggtttagtaggataacatttctccttcatttctttcatttttagaaatctttcttcacggaaattcttttttttaaatgtttatttctgtctttgaggagtgagattgactggctatcttttaatacctgtgtgtattatcattattgtatcttgctgataaatttcacaacagttaattattttattccccatttcatacttagctctattttaggcaagttcacaaatatcattgaatgagttcattcaatgtcatcatgatgatattgaaatgtcaatagcagatgacttgtttctggggtgttaatatgcctgttggttacatttgtgttttttggtgatggaaggcagccactgaggcaaacagcaagaatacagctaagcctctaactgcatactcttctcactcgttgcttaaaactgaagcgtggataattggtgtgcattccctaaaaagttatgtcatgatgcagtagagaaataagttaactttcctatccctgtatcaaagtttcttttgaaggtaactgagacagcgccaaataaggagcagagtttctgtgaatcatgaaatctttctaaacaattgagaaaaaaaaaactgttctgaaacaaaaacttgtgccctatccttttatttgaatgtgttttcttaaggccacaactggcagagatttgatgattttatgtttaaagcaattttttttttttttcatagcaaggagtcccactgccatcaggttttgtttttggagagattctgtaactgacatagggtaacttactctgatggcttgctccacattcactacaagtacatactgttctgaaaaatctcaaagttgaaatatttttatttgggcaacttctgcaatcaaggtaattcactctatctttggagaataaaatggaaaagggcaacccaatctctgtgaccttaaacttccactgaaacttagagacggttagcttagctggtgagagcgtgctgctaataacaccaaggtcgtggtttctatcccattacagggcagtcaagctcaagggaaaaaccctgttctttggcacagcttccatggcctgctagccgtttacagcgaggcaaaagagtagagatgttttagtgaactaggccatgacttggggagtctccaccttgaatctggttgtgggaccaaggaagagaatctgctgaggctgggtagagagactctagagcaccttaggccacaggacagcagaggatgagaataacagaactggcttcagaaagtaggtgtcagtccaaggcactgtattcaatacatgtagcaaagaatgagcttctgacaccaggaaagtcttcagatggcagtgactgcataaaccggtgtcaggatgtctgactataaaggatgggacaccttccatcaggtgagagctctggaggtggagtctgttcctggaagaagcatgggtaaatgtcatcaaaggttccctcagccaccactgggttcagggctgaggtgcacctaggaaggcttgggcagaagcatgacccctggaacttggccaactgagccatcagagagtggtgcaggtgaggagtggtagatgtgtagtgaaccactcagctgtctgcccaggccttgggtgtggaagtagagtcttctgtgtctttgggcagactgaattataagcttcaccagatcgccaagctaggaatgttgacatacctggcttggggtcagggagggactgaactgtaggtggggggccccaacaaatctaatcataagaatctatgagcgtggagacagaaggaccaaagaagggatgctgtaaccaattatcattattgaaaaactaggcagagattacattcaattggcagtaccaccctttttatctctgacatagttccagaaggatatactatgtatctagtgtgacactgtctgatagaattgtctgaaatgatggaagtgttctgtggctacccattttgatagccactagccacaggtggctattgagcacttgatatgttgttggtgtgactgaggaactaaatttttaattcaatttaaattaaatttaatttaaatttaagtagcaacatgtggctggtggttactggattgaaccgaacagatctagatactagagtaagtggtagcagcaaatcctatattggaacaatgtaaattaacaattataaatatatgagcaggacaaagcccaaatgggcctgtactcttagttttgctatatattcaaccataactagcactcattttttaaacttataaaatgcaaactcatttggttgtgatgatgaatgctcaggtaattgttgagtttcaacacagtgacagccaggaactcattttggagacttggattgtgccacagtttgtccctctataaaatgatgatgaaaattttatcagtatctgtctcaagctgtagttaatgggccaatttctaaatattcctgtcaaattgtatagccattgttttcaaagtagttttgaaagtaggccattggtaaagcaatctattaaagtgcaggaagaaagtaatagaatctcttactttttaaagtctcattatgaaaattatatttcagtttgtatgccttcgatgtacataatatattaatacacaaatatattaatgcagcggtccccaaactttttctcaccagggactggtttcctggacgacagtatttccatggattgcagcggggatggtttcaggatgaaactgacccacctcagatcatcaggcattattaggttctcataaggagcacacagccttgagcaggtgcagttcacatatagggtttgcgcacctatgagaatctaatgctgccgctgatctgacaggaaatggggctcaggcagtaatgctcgctcactgctcacctcctgctgtgtggcccagttcctaacaggccatgaactggtaccagtctgtggcctgggggctggggagtcctgcattaatgtaattaaatatgtacatttcttgagagtgtttgttcaaatattttttcctaatagagacgtataacttagaaagtatggaaccctctggtcagtagcatattttatcaaaaaggctatccgtcgtgctaaccaatgtgattaaatgttcattttagtctcagatattttgataacataataatagggaagttatggttattgcatggcttttctttactgtattttcaataactatattaatgggttcagttgttactagttttataattctgttttattctcaatgagtcttcctgtttctccccacgtctttcctatggttcatttccctgcatctttacagctccctggaacattctctcaaatcaatcagaggcttcaaaactgggcagtctcattttgtaacctgctctgactcgcctctgggaggcctccctccccactcacagctgccttcctgcatgatgtaaaatgaatacagtgccagaaagactgatccttggaacctcttccttacttagtttctttatagttctgattttagaaatgaccattttacttccagtgcccttccccacaccagttagctgagactctatgcaggaagttcccagtgatcagaactgttcccatagctcccaggtgattctgacatgcacccggcattgagcaccatggacatggctgctgtttgttatcctcgagctctgcaaagcagtgtcggatattgcttgattgttgcacattaatctactgcacggtccggtaggtagccactagccacatgtggccatttagatgtaaatgaatttaaattaaatagtattataagttcaacacctcagttgcactctctgtattcaagtgctcagtagctacaagtggttggtggctaccattttgggcagtgctactatacaacatttctatcaccacagagagtgctgatgaataatagtactaacaactggaaacattgaaatggagaggtgaaggagagaaggcagaatataagagaaacttcaaagcattcagcgtgtctgataggcgctgtatcttacattatgtttggagcatagtttttgaatttcttaattttcaaattcggttgaaacagattttggtcaattgaagtgaaggactatgcctgctttaatttgcgtagcttacctttgtttcacgtgtctcccttattacagtgtttgtagcagcatctaactcaatccctaacttctttttggtgcagggaccatttaaaaacaatttgatcatagaggttatctcctttgcaatccatattgttttatggaacaggtgaacagctggtgacaatagcctcaaggtttctaatcccaccaaaggaaaatatggtgtcagtaattaccttgtactatgatatttgtgaaatccaagagagggctagatctcaggctctaataatacatccgtataaacatctcagtagggcaccacggaagagtcttaggatatcaggaacaataagagcgggagaatatcgaccttaatattctttacacttattaaaaagtgaaaagacagccataaagcagaatgagttcctgtcctttgcagggacatggatgaagccagaagccatcattctcagcaaactaacacaggaacagaaaaccaaacacctcatgttcgcactcataagtgggagttgaacaatgagaacacatggacacagggagtggagcatcacacaacggggcctgtcgggagttgggggactaggggagggagagcattaggacaaatacctaatgcatgtggggcttaaaacctagatgacgggttgataggtgtagcaaaccaccatggcacatgtatacctatgtaacaaacctgcacgttctgcacatatatcccagaactaaaagtaaaataaatgaaaaagaaataaaaaataataaaataaaataaaataaatgaaaagtagccattttaccagttgagtatttactgacttttggtgaaaatcactttctaagattactagaaaccttatgaccctcggcctctactcccaccacgtgcggattttcacctccacctactttgtcacgtcacatgcccttctgctctttaggacacttgtattgggttcctcccccacacgtaaacagaacacacaggtctgtgaatggacctcattatgctcatttgtctttgccaagaactattgaaaatgatcacaaatgactatgtaattataattaagattttgtacatgcatacactttatttttaacaagtttgtcctgttaaatgtcaccccattttgaatagtaacattcactggtgcaaggaagaattattaaaatgacaatttaactgatatccttgacaggtaagccagttattgtatttcataattgtgattattacaatacctatgaagattaattaggacaatttattctataggacttggttatcaaaatgatcttttttcccattttagtccatacatcttcagttttaatttccttcttccaaagaactctgagtcttgcccagtgtgatacttcagattttgtaaaaatataatgaagaagaataacatgtatcagatcttttttttaatgtactgggctaaaaattataagcaccatcaaattactagaaaattcttttaacactctgcttcttagttaaaaaatgattcctttttgtgataatcttataattttcaaagtatcattttagaaattttaaaaaattattcttgttttcattcagtccatttcatcagaacttagattttttcttccctctacagtatgtggtcttgatgtgctttctccttgcaaaataaaatctttagtttcaggatctctgtgttctattccttcaatttaaaatcataggaaaaataactatcatttccttatgtctgtctccaattcccccatcattttctgtgagccaattttcttctttttcttctgtctactgtaaggaactttttactctgctctattctctgcaattcagggctcacaatttctttgacttctcagattatcctttgtacttgtgtctactttttcattaaaaaaaaaaaggcttcggtcttattttgactttatcatctttatattgccatatttaaaacccatctgcttattgattgaaccaaacttttcatcttacttcatcatactgaatgtataacttctgaatgacttaaaaatcatcacataatgtgagagaattttctatcatattcaggtgactgcattgtaagcaatgaagttgaagaaaaatagcttataatggatataataccaagaaataataagaatgagaatctgcgtatatcatatactgggttaacaagctcacaaggcaaatcaccattttattagatatttaacaaatcatactagtactggaggaagtatagcagaaaaaaggagtatggacattgggattagctgccttgctaatcttttgtcagtccctagtgacatgcttttgggttgagtcattgttacctccctgagctgtttgtttataaaatgggggtaaatatctcagatgtttcagtgttgtgacatataaagcgtcctccatagtacataataccgtaagcactccataaggtaattcttgtccttttaaaaagtatacacttttgagttcaggacacgtacactgtaacctagttgtaaccattttaataaaagaaggttttgatcatttttgataaatgtactacatgaatagttaacttgcctttcacttcctataccaacggaaattttggtaacaaatttaaagaaagcattaggttgaatatcccatctgattaaatgtcaactaaatattgtttctggcttttaaaatatttctaattcagttataaaacaggtctattactcaggaggctgaggcaggaaaattgcttgaaccagggagtcggaggttgcagtgagccgagatcatgccattgcactccagcctggcgacagagtgagattccgtctcaaaaaaaaaaaaggtgaaatgaaaaacaaaaaagaggggtgaaatttctctgcattctccctttctgctgttgggaaagccctttcattaccaagaatgcatggaattctgcttattaatttctccatctatgtgtctctgtgaaaaatactaattatttacaattttgtaagctatgaataaggtctatgttttctctgaaattatagcaacaggagcatttcccccttatttgggccgcaatcttttcattctgattcttaccataacttctgacttctgactttatcatgtcttctgatttctactaaacatgaacagaatgaatgacttctagaaatggatacaggtgtaatacatataaggccagggaaccacttaattatctttacaaagtactaggacttcagaaaaatcaaatgatgaaatggagctagctttagtatgttctacttatcattggactattaatcatgtctgtctgatgagttacctaggacttcaactgtttttatagatttaaagaaaatattataaatgtatcttacctggatttaagactggacagctgattttggatttttttctgctaccctgttgttgatatcactgacatcagcctttgcattttgactggaggctcctttctctctttctctctctctctctctctctctataggaaaccagtagttatgtcaggttgctaagtattttcccactgaaggacaaatattctggagcagtatatatttagcatttgacatttgataaacaagcttgtttgagatattttcaatacaatttcagctttggcaattgtaagcaaaggatccagttggtaattggtgaaatgaacagatgtggacacgctgcctgcatcgagatgcattaatttttctgaaaagtggataagatcttgtgagaatgaataatggaattcaaatcagatggggtgagatatttgatattcaggaacaaatcacagtataatagatctgctactttgtttggttttaatggggagttgctaatgctgaaatatagtcagagaaaaggaacgtggaatttctatagaggagagcctggctctggggtaatactactgtccttggtggaatgttgtcttttctgaagacattggttcaattcaatacatgaaacattcatcgattattatttagaaaagctaatctactgacaagacacagagttaagtagtgaaaatacagagacctagacacagttcttattaagaaattttttaatttaggtggcatatttcagagagaaattctctgcttggggcaataggtacctcctttggaataagcatggtgagaaagaattgcttctggcagattagtgagaagagtgagatattttctttcgatgacctctctattaaaatttgagtggtaaaactttgtgatgattcaggctcttcataattcttaattttatcatcctctaataccaggacttgcccagatcaatattttaggaaacagtcatgcttgctaaacccagggatttctattaaccactagataagacataagtttgtcatgcaacaagtatttattgagtccataatttgcccagcactgggctttggtactctgggccttgatactctaggttgtgtcagagatgtctaatatatttaaggtgacagagttcacaaatgagactttatgaaaatgaatatccctttttaagtctcgagaaatatgatgtgcacccgcttgaggctttattaaatctccagcgagcatgaacttgtttgtgacccaattgtagaattgttgtatgatgactatcccactggcaggcacttcttgtccaagagaatgtaattggatgttggtgactcaagcaatcctgggaagactcctccatgaccaaattaaagacaacaggggcttggtttgtactcagctctacaccaatcagcatgagacaaagaagagatccatggcaaagtggggagactactgtttattttacaagctagagaaggaaaactgcagttcctgagttgcaaaactgctaagaaatgggagaacacagaactttacaggctgaaccttggtgtcttagttattcctcttggctacagaatgccaaccagtaggagattcatcactgagatattacagggaaatgaagccaggcaagaaaaatatgtattccctttcttctcagcccataaattttgttattaataaatcagactcttatagaacagcttgccacggctgtctctagaaatgtttttattagcagaatttttattaaaataaaatacacagtagttttaagagtgaacattatagttttaggtcataaggggtgtcatggagaacacatgtggatgctacttgccagttacttgatctaggccttgactcttggttttctgttgctcggataagttagcatgatttgacatgcagttaaaggtgtggtaacctgtgattgatttcccattcttgatgctccctgcctggacttctcggaaaatttcaaaacaattcattcttctatgagggctgcctccttggttgcttcggctaaacagtgttgagcaacaagttgggaaaggaacgttgcagtaacttttaaaaattaagttagaaacaaatgtcatcaaagtaaatgataatttgccaatatgattgagcaaaaagatgaagatgcacgctccctacgtatttgctttgcagaagaattaatttgaaaaataataacatattttaaaatgaattgtaaatataaacacatgctaattgcagaggggaatccctgtgattattcagcagtttgtgtttgtcaagtgcttttcagtcagtccattccagctcagcagggcagaggcttgggctgttgtaaacttgtgggcagatacccagtgatggggcagacatgagcaggtagggctgacagcatgtgaattgagttttcttcagtcatgctgttgcagctgctcccttccctcattgctgagtttgccacagcaggtaggaacctaactctggagcctgggatgaaggagaacccacattgggcttgaggaacaagatctgccaccctggtaggccctggttaaatctcatgcaagtgtagcaatgagagagggtatgattgagttctaatttaggaggaaaggggataatgtgccctttgcacccccaggagaaatcattgctcatctgtgcctaagtagacttatcaagggcagttggttcacaatggtgtatcaccccaaaggactatagtgttatgagaacttgccagtgtatttgaatttgggtgctggcagatgacatcatgaggtattatggttacccataaatatgctagtttattgagaaggtggtagacatgctagtggatgagagggaaggacagaagcagttagtaaacagcatctgcaacaattcagttaactggtggttgtcacagtagcatggtggaaaagttggcaattaataacttctaagaaaactgaactaatgaaccaatcctgcgtgtgctatgtgtataacctccttctcactattaacagatttgttccaaacttatataagacaatgaaaataaagcttggcaatatagggaagggatggagggataaagctgtaaatcacgtcacaggcaaattaagatataccactggatcaagggatttaatgcagaaagactgatcctaacttatttcttttatttagcaataagatttgttacttacattgattatttaaaatgagttgcattattagaaaggactattttgaagacaactataataaaatgtcagtaactgatagtagccaagatattttaaatatatcaaagttgtgtcattaatattaatgtgtcccttaatatgaagtcctgcccaggcttatttatgtattcaacagacacatacctgttgaagtgtaacagatattctggacacaagcaatggtaaacaagacagatgcagtccctgctttcatgcaatttgcaattgaatggtctttgacattttattgtgattgttttagttatttaattggagaagtttttaatttaaatttgtgttatattcagtgttaaggaacaaaaatgtaatgtgcatttctgagactcagtaacacttctggtttttcctttttcatttaaagaaaaatttagtgcccaagataagctagaatttttggaatcaagtaattgatgacctgggagccaattttattacaatagtgtttttagtggtcttagaacttttcagaggtggtagctctgaaaataacactgtaataaattcacacatacatctatcatccaataaatgttaattgaggcccactacagcattgtgttagattctgaggttacaaattgttgaccccatgtcgaacatgttgaccccatcaatgtaatcagtttgacattacacagtcatttaaacattaaagtgtcagcggatattttagttgtaattttgataagtgctctgaaggagaaaacagtgggtgttgtgaaaagcagtatttggttgattgattattatagaggatctgagaaaacttacttgaggaaggaacatttggctgaactcaaagagatgagtaggagttaagtaagcaaggaagaaaagaagacacatgaaggaggaagaatgttctagaaacacacacacacaggtatatgtatatgtacatgtatatgtatatgcatatgtcttccttagaaacatataaacagctgcaacatgattgaacttatttacccaattaccaaagcttattttgcaccatgaaggtggagataaaggctttttaagcagcaaggatagaatctttgtagtttttatttataggctggttcttctgacaactttaatttttcatctttaccaacttcatggtcttcagtacatacaatgcaatcattattataaaattatattttgactcaaactctaaggtaggatgattcagctgtgcgccatcaacatagcagcatgaatggtagagactagtcattccaaacagtgaaggggcaacgtaaaactaattttaatattatatgaaagtacttcttgcccttgactgcttttttttttttttgaagaaagcaaactttaaaaatttattttagatttacagaattattgcaaggatagtaagagagttctcatatatgcctcacccagtttcctctattatcgacatcttacattatatggtacatctatcataactaatgaaccaatattgtttcattattagtaactaaatctatactttattcagattttctaagttttcctctaatgttctttttctgtcccaggaccccatcaggatatggtatgtatagttgtcatgtcttcccaggctcgccatggttgtgacagtttctgagactttcattgtttttgataccccaggtagtttaggcattttgtagaatgcctcccagtctgaatttgtctgatgttttcctcatggtttgactggctttaatgtgttttggggaggaagaccacagaggttaagtgtgattgtcatcacatcgtatcaagggtacatgccatcaatatgacttatcactgttgatattaaccttgatcatctggcttgagatagtatttgtcaggtttctgtattatacagttactcttctccctgtccatacagtactttttggaagaagccattttgtgcagctcattttttttttaattttaattttaagttctggggtacatgtgcagcatgtgcatgtttgttacatagttaaacgtgtgccatggtggtttgctgcacccgtcagctcatcacctaggcattaaagccaacatgcattagttgtttttcctaatgctctccctcccccaaccccaatctgacaggtcccagtgtgtgttgttcccctccctgtgtccatgtgttctcattgttcagctcccacttctaagtgagaacatgtggtgtttgggtctctgttcctgcattagtttgctgaggataatggcttccagctccatccatgtctctgcaaaggatttgatatccttcctttttatggctgcatagtattccatggggtttatgtaccacattttctttatccagtctatcactgataggcatttggtttgattccatgcctttactattgtgaatagtgctgcagtgaacatatgcatacatgtatctttgtaatagagtgatttatatttcactgggtatatacccagtaatgggattgccaggttgaatggtatttctagttctagatctttgaggaattgctacaccatcttcctcaatggttgaactaattaatttacattccgaccaacagtgtaaaagtgttcctatttctttgcaacctcgccagcatctgttgtttcttggctttttaatgatcaccattctgactggtgtgagatggtatctcattgtggttttgatttgcatttctctaatgatcagtgatgttgagcttttttcatatgttctttggcctcatgaatgtcttcttttgaaaagtgtctgttcatgtcctcttccaactttttaatagggttgtttgtcttttcttgcaaatttgtctaagttccttgtagattctggatattaaacctttgtcagatgtatagattgcaaaaaatttcccccagtctgtaggttgcctgttttctctgatgattgtttcttttgctgtacagaagatctttagtttaattagatcccatttgtcaattttggcttttttttgcaattgcttttggcagttttgtcatgaaatctttgcctgtgcctatatatttattgcatagattttcttctaggggacttcaaactatgctacaaaacttcaataaccaaaacagcatggtactggtacaaatacagacacatagaccaatggaacagaatagagaactcagaaataagaccacacatctacaacgatttgaccttcgagaaacatgaccaaaacaagcaatggggaaaggattgcctatttaataaatggtgctgggagaactggctagccacatacagaaaattgaaactggaccccttccttacaccttatacaaaaattaattcaagatggattaaagacttaagtggagctcatatttaaggagtgagaagatatgctctacctctttaagggtggagtagctctataaattatttggaagtgtctattctcctccattaatttatttagtcaacaattagtatcagccatctagaacccatgaatatttatgctttgggtacagtccaatactattttattttgtagctcatcttgttccagctttggccatttggagatttttcagttggctcctgtatctctttggcttcttacatatcattgtagggttttttaaaagccttttcttactttctgtcactacaagatagttcagacttatcttctgtattttttgccccagttctatgatcagccacttctccaaggagcaataatttccttcaatgaaaaccaagatatgggctgttggtgtacttgttgttattgtgtgttgttacttctagatcctctaagctgatagtgcaaagagatatatgtgtgtgtaccaacctatatatctacacacatataaaaatatttctatttgtaaccatctgtatctatcttaggctaaacctgagtacctactgatgtctccaattctaacctgcaacagcatggaacattctagccttctcctcttacttatctgtcacttcctataccaatagtgagaaacctggctcctaccatctgctatttatttacttaattatttaattccactatacttctatggaagtttcagaattgttaatctgtactcatgtacgaaacaactttatcaactagagtatagtgtttatatacagttcctttgcctttattctaacagattccacttactcattttccgagtcacttaggttagcgccttattttcctaagtccattagtgagtttgcttcatgtatttgtcatacatttaaattcttttgtaatattgtgcattccatcccagtttcccctgacatcctaaattaactttttaagtttggatacattgtggtctattctttgttctgtaaagctttatggattttgacaagtatttaatgtattgtatcaccattatagtaatatagttcctatggaatagaatagtttctatcgctgtagcatagaatagtttctctactctataaaatatcctgtgtttctctaattcaacccctccttcccaccttgaactcctgacaacccctggtctgtttaatatctttcttttgtctcttctagaatatcatataattgaaatcatacaatatgtagctttttcagactggctactttcacttagcaatattcatgtaagtttcatctatatattttcatggtctgatagctcatttctttttaatcactgaataatacttttatttatccactcactggtgaagaatctcttgattgcttctaaattcatggcaattatgaatgaaactgctctaaacatttttgtgcaggtttttgtgtgcatgtgtattttcaaattagttgggtaaatatctaggaattcaatttctgcatcattgtggtaataatgtgtttagcttcataagaaattgccaacctatcttccaaaatagctgtaccattttgcattcccaccagcaatgaatgagagttcttgatgctcgacatccttgtcagcatttgatttttgtcagtgttttggattttaactattgtaatagatgtgtagtagtgtttgattgttttaatttgcaatttctttttcttttttgagatggagtctcgctctgtcgcccaggctggagtgcagtggcacgatcttcgctcattgcaacctctgcctcctgggttcaagcaattctctgcctcaagctcccaagtacctgggattacaggcgcctgccaccatacccggctaattgttgtatttttagtagagatggggtttcaccatattggccaggctggtcttgaactcctgaccttgtgatccacccgccctggcctcccaaagtgctgggattacagacataagccacggcgtccggcctgcaatttcttaatgacaaaaaatattgaggatattttcacatactttttttgccaactgtattttttttaattaatttttatttttattttattttgtaacttttattttagatttggggtacatatgtacatttgttaatacaggcaaatttgtgtcacaggggtttggtgtacagatcatctcgtcacccaggtactaagcatagttcttgatagttctttttcctgatcctctccccactcccactctgttccctcacgtaggccccagtgtctcttgttcccctctttatgcccattggttctcattatttatctctcacttaaaagtgagaacatgcagtatttggttttccactcctgcattagtttgctaaggataatgtcctccagctccatccttgttcctgtacaggacatgctctcgtgttttttttctttctttttattttaatggctgaatagtattccacggtgtctatgtactacattgtttttttttaaaccctgcataccattgatgggcatttaggttgattccatgtttttgctattgtgaatggtgttgcaatgaacctacatgtgcatgtgtctttatggtagaacaatttatattccactgggcatatacccaggaatgggattgctgggttgaatggtaattctccttttaggtctttgagggatttccacactgctttccacaatgggtgaactaatttacactcccaccagcagtgtataagtcttcccttttctccataacctccccagcatctggttttttttgtttgtttgtttgtttttttagtatttaataatagccattctgactggtgtgagatgatatctcatcatggctttaatttacatttctctaatgattagtgatatgtagcattttttcatttgttgccaactgtatgtatttttcaatgaggtgtacatcagatcttttgcccattttaaaagtggggttttgggctgggcgcagtggctcacgcctgtaatcccagcactttgggaagctgaggcaggcagatcacctgaggtcaggagttcgagaccattctggccaacatggtgaaaccctgtctctactaaaaatacaaaaattagtcggacatggtgtcgggcacttgtaatcccagctacttgggaggctgaggcaggagaatcactggaacccaggaggtggaggttgcagtcagctgagactgaaccattgcactccagtctgggcaacaagaatgaaactccatctcaaaatacatacatacatacatacgtacatacataaaattgggtttttgttttctttttgttgagtttgaggagtttttttgtatattttgattacaagtcttttatcagccatgtgtttcacaaataatttctcccagtttgtggcttatcttttcactctcttaattgtttttttcaaagtagaaatttaaattttaatgaagcccaatttattaatttttttcttccatattgtgctattggtgttgtatataaaaacttactaccaaattcaatatcatatagaattttttctgttttcttcaagaagtagttttataattttgcattatatgtttagatcaatgattcaccttaagttttgtttaaggtgtaaggtttgtgtataagtttttctttttccacatcaatgtccagttgcttcagcaacattttctttttatatatatcttaagggtaatcagcgcaatattttctgaaaagatgacctttttctcatttaattggctcttctttgtcaaagatcagttgaccttatttgtgtggatctatttctggacttcttactctgtttcactagtccatctgtttatactttaaccagtaccatactgcctttattactgtagcctttatggtaagtcttgaaatgaaatagtgcaagtgctccaccttcttcagaattttgttcttcttcagtattaaaggctattctaggtcttttgcccttctttaaacatgttggaatcaattgtcaatatctacaaaatagattattgggatttggatttagattactctgaatctgttaattaagttgggaagaattgacattttatcaatattgaataatatgaacatgtaataatattgaactttcaatctctattatctcttcatcattttaagatcttctttcatttttcattgttttatagatttttacatataggccttgtacatactttgttaatttatatcttagtattgaatgtactattataaatggtattttctaaactttgaattcctgttattcatgatgatatgtaggaaagaaattgacttttgtatattgacattagatcctttaaccgtggcatcattacttattagttccaggggagattttgttgttgttgttgattcattggaattttctgcatagataatcatgccatctgtgaataaagatgttttatttcttccttcccaatctatatatcttttatttctttttttgccttattgcacttgctggtatttctagcataatgtataataggaggaatgagataagatatcttagaattatcctcatcttcaggggaaagtggttagttttttgtcattaagaataatgttagctattgtttttttaaatttcctatatgaaattgaggaaatttctgtctattctgaatttgctgagtttttaatcataaatagctgttgaattttgtcaaatagttttcctgtgtcaattaatatgatcatatgacttttcccgttttcactgttaatgtggcagattatattgatttattttcaaatgttgaatttgccatcagacatggaataaatcccatttgttcatgatgtataatttattttatgcatcgtttgttctgtcttgctaacattttgttgagattttgtgccagtgctcaggagagatattggtctctagttttactttcttataatatctttatctgatttgggtattaggataattctagactcagaatgagttaggatgtgttttctctgcctgtttactaacacagattgtagagaattggcacaatttctttcttgaagatttgttagaagtaatcttgccaccacctgagccagatgatttctttagaaggtaattagttattgaatcaatatatttaatatatatagagatatttaggctatttatttctccatgtgtgagttttggtagtttgtgtatttcaaggaattggtccatttcatccaaattatcaaattcgtgagcatagagttgttcataatattcctttattatccttttaatctccaagagaccagtcgtggtgacttctctttcatttatgatattggtaatttatgttttctgtctctcttttttttttgccagagtctaactctgccacccaggctggagtgcaatggtgtgatctctgctcactgcaacctctgcctcttgggttcaagtgattctcatgtgtcagcctcccgagtagctggtattacaggcatgctccaatacacttggctaatttttttttttgtatttttagtagagatgaagttttaccatgctggccaggttggtcttgaactcctggcctcaagtgctctgcctgcctcggcctcccaaagtgctaggattacaggcgtgagccaccgtgcccggcttctttttcttaattagcctgaatagaagtttatcaattttattgctcttttaaaataaccagtttttgtttcactgagtttctttatcatgtttctgttttcaattttattggcatctgctctaatttcagatgctccttgacttatgatggggttgtgtcccagtacatccactgtaatttgaaaatatcataagtcttttgacttatgtaatgcatctaacctaccaaacattatcgcttagcctaacctcccttaaatgtgctcagaacacatacattagcctacagttgagcaaaatgatctggcaacaaaacacactatagagtattgatggtttaccccgatgatcacatagctgactgagagctgcggcttgctgctgctgcccagcattaagtgagagtattgttccatatattgctagcacagaagatctaaattgaaaattcaaaatacagtttctactgaatgcatgcatattacttttgcaccattgtgaagtcaaaaaaaataataaatcaaaccatcttaagttgggaactgtctatattattctttctcttctgcttgctttaagcttatctagtttttttcttctctagtttccttaggtggtggcttaggttggttattgatattatatatttttcttatctaatatatttacttaatgctatgaatttttctctaagcactgcttttcctgcatcccacaaattttgatgttctatttttatcttcatttagctcaaaatagtttaccatttattttgaggctttttctttgactcatacgttctttaaaagtgtgttgttcaatctctaaatatttcgatattttccagctatctttctgttgatttctaatttatttccaatttggtgtgagagcctactttgtacactttctgttcttttaaatttgttaagggtgttttgtgacccagaatgtggtctatcttggtgcgtattccatcagaacttgagaagaatgtgtattaagttgtggtttgatggagtattctataaatattaattagaccatgttgattcatcataccgtttaggtcaactatatctgtattaattttctgcctgcttgcactagcaattactgacagcggaatggtgaggtttctaagtataataatggtttgggcttgtctatttccccttttagtttcaatcattttgcttcatgtgttttgattcacttttgttaggtatacacatatatacacatatttatgattgttgtatcatcttgaacaactgacccctttatcatcatctttatccttggtacttttccttctttggtagtctgctttgcatgaaattaatatagccactccagctttatttttgtgaatgttagcatggtgtatctttctccattcctttacttttaacatatcagagttattacatttaaagtgggcattattactaggataaataccaaataaagtattttgcatgctgggcttaaaacctagatgacaggttaataggtgcagcaaaccaccatggcacatgtatacttatggaacaaaactgcacattctgcacatgtatcccagaatttaaagtaaaataaaaaataaataaataaaaattaaaaagtaaaaataaattagctgggtgtggaggcagccagctactcagggggctgaggcaggagaatcaaaataaataaatcaataagtggggctttttgtagacaacatatagtttggtctttcttaaaattcaatctgacaatttccatcttttaactggtatatttaaacaatttatatttaaagcaagtgttgatatatttgaataaaaataaacctgtgtttattaactatttcatatttgttgccaaacgcttctttttggtctttcgtagttttatttgagcaatgtatgtcataccattttatcttttctcttagagtattaactatacttcttttttttttttttgagacagagttttcctcttgttgcccaggcgggagtgcaatggtgcgatcttggcttaccgcaacctctgcctcctgggttcaagcgattctcctgcctcagtctcccgaatagctggaattacaggcatgtgccaccatgcccggctaattttgtatttttagtagagacggagtttctccatgttggtcaggctggggtcttaaactcctgacctcaggtgatccaccggcctctgcctcccaaagtgctgggtttacaggagtgagccaccgcacccggcttaactatacttctttaaagaatttttgtagtggtgccgctaaagttcacagtatacatttttaagtattctaaatacaccttcaaataacactattcctttttacatgaaatatagggatattataacatagtattctcaattcctccttactgtcccttgtgacatagctgtcatttatttcatttcacttacctatatactataatcacctatacattgctgctattatgattttaaacaggcagttattgtttacgtcaattaagaatttagaaagaatttagaatcctgtgtaaaataaatttccttttattttaccttaattcatgcattctctgattatcttccatgctttatgtagatccaagtttctgacttatatcaccttcctcttgcttgaagaacatcttttaacatattctgcagggcaagtcagctggtgatgaattctctgaatttttgtctgatttttttttaatatttccttcacttttgaaggataatttccctgcatctagaattctaaattggtcacttttttcaacattttatatattttacttcactttctttattaatgtacggtttctgaagagaaatctgctgtatttcatcctgttctctatggttaggtgcttccctgccctggctctggctttttcaagattttctccctgtctttggtttttctacagtttgaatacaatatgcctaggtgttgtttgttttgtttttttgtaaggagtggcatgtatttatcttcttgatactccctgagcttcctggatctgtggtttggtgtctgtcattaattttgaaaagttctcagccattactacctcaaatatttcttcttcgcctttctttttttttctttctggtattccaattatgcatatgcttgttataccttttgctttttcattcttttgattctttacatttcagttggggacgtttctgttgacttatctttcagctcactgattatttccttggccgtgttgaatcaattgattagtcctcaaagacatttttcatttctgttacaccatttttacatttctagcatttgcttttgattctttcttaaaatttctatctttctgcttatattacccatcttttattgtatgttgtcttctttttccattagagccctcaaactctttttttttattatactttaagttttagggtacatgtgcacattgtgcaggttagttacatatgtatacatgtgccatgcttgtgcgctgcacccactaactcgtcatctagcattaggtatatctcccaatgctatccctcccccctccccccaccccacaacactccccagagtgtgatattccccttcctgtgtccatgtgatctcattgttcagttcccacctatgagtgagaatatgcggtgtttggttttttgttcttgcgatagtttactgagaatgatgatttccaatttcatccatgtccctacaaaggacatgaactcatcattttttatggctgcatagtattccgtggtgtatatgtgccacattttcttaatccagtctatcattgttggacatttgggttggttccaagtctttgctattgtgaataatgccgcaataaacatacgtgtgcatgtgtctttatagcagcatgatttatagtcatttgggcatatacccagtaatgggatagctgggtcaaatggtatttctagttctagatccctgaggaatcgccacactgacttccacaatggttgaactagtttacagtcccaccaacagtgtaaaagtcttcctatttctccacatcctctccagcacctgttgtttcctgactttttaatgattgccattctaactggtgtgagatggtatctcattgtggttttgatttgcatttctctgatggctagtgatgatgagcattttttcatgtgtctgttggctgcataaatgtcttcttttgagaagtgtctgttcatgtcctttgcccactttttgatggggttgtttgtttttttcttgtaaatttgtttgagttcattgtagattctggatattagccctttgtcagatgagtaggttgcgaaaattttctcccattttgtaggttgcctgttcactctgatggtagtttcttttgctgtgcagaagctctttagtttaattagatcccatttgtcaattttggcttttgttgccattgcttttggtgttttggacatgaagtccttgcccatgcctatgtcctgaatggtaatgcctaggttttcttctagggtttttatggttttaggtctaacgtttaaatctttaatccatcttgaattgatttttgtataaggtgtaaggaagggatccagtttcagctttctacatatggctagccagttttcccagcaccatttattaaatagggaatcctttccctgttgcttgtttttctcaggtttgtcaaagatcagatagttgtaggtatgcggcgttatttctgagggctctgttctgttccattgatctatatctctgttttggtaccagtaccatgctgttttggttactgtagccttgtagtatagtttgaagtcaggtagtgtgatgcctccagctttgttcttttggcttaggattgacttggcgatgtgggctcttttttggttccatatgaactttaaagtagttttttccaattctgtgaagaaagatattggtagcttgatggggatggcattgaatctgtaaattaccttgggcagtatggccattttcacgatattgattcttcctacccatgagcatggaatgttcttccgtttgtttgtatcctcttttatttcattgagcagtggtttgtagttctccttgaagaggtccttcacatcccttgtaagttgtattcctaggtattttattctctttgaagcaattgtgaatgggagttcactcatgatttggctctctgtttgtctgttgttggtgtataagaatgcttgtgatttttgtacattgattttgtatcctgagactttgctgaagttgcttatcagctgaaggagattttgggctgagacaatggggttttctagatatacaatcatgtcgtctgcaaacagggacaatttgacttcctcttttcctaattgaataccctttatttccttctcctgcctaattgccctggccagaacttccaacactatgttgaataggagcggtgagagagggcatccctgtcttgtgccagttttcaaagggaatgcttccagtttttgcccattcagtatgatattggctgtgggtttgtcatagatagctcttattattttgacatacgtcccatcaatacctaatttattgggagtttttagcatgaagagttgttgaattttgtcaaaggctttttctgcatctattgagataatcatgtggtttttgtctttgtagagccctcaaattcctaatcacaattgtttatctctttcctgacattccacatccaatccatcagcatgtcttattggctttactttcaaaataaattaaactcagccacttctcagcatttttaaaatcaccctaatacaaaccccctgctacctcatcaactgcaatggcttcctaacttattttgtaacttttgatctttgagttcttccaagagccaagagttcttccaaagctataaaccctatcattggcactcctctgctctatggaaagcagtggcttctcatctctttcagagtataatgcaaagctctcaccttagctggcatggccctgtgggattggcctcccttgtcttactttttccttgttcaggctgctgtgacctctctggtctttggctcttactagaaacctttgaacccgtttccttcccagtgtcagtatttgtgtgttgttcgttcacccttctcacttcattctggtttctacagcacagagaagtagtagtccctgatctaaacaccctctccacctgctttccactttgttttttcccctagcacttaccattatcagatatcatatatttatttgtttattgtctaacttcctcacaaaaatatgacgttgtgaggatagggatttggctttttgccccagagcagtgcctgactctcaataactttgttgtattaagtgaatgaataaaataaaattaaaattgattcaaagtgtatgagcatgtgtacattttacataagtgatacatgacattcttccattccttgggggctcttttaaccattctcaaccagttgtagtacctttaaaaaatcatgatgaagatgattttgagagctaattttggtaggagacagcagttttagcctgtccgctccatgtgcagaataatagcctattttattacatctgatattcaagcactagaatctatcaataggtaaataatttccaaaaataaaagcatcagtgggaaaacagggaaattatttttaaaaaagaatttctagaccaggatgtgtgcaatttgtaatctctaataagaaacgttatagctgataattccagcaattacagaatcatgatcatatccataatggatcagtagaggctctggcttatataatagcttgccctctcaggattctagagccccatatgtaaacacagaacacatttatattgattgacagtgcatgtaggtttctacagattgtgccagtcagtgttttctaaggcagttatgccatggtaattaaaattatgggctctgaaatcagcctgcctgggttcaaaccccagcttcatgtgtcagcttccttggctgtaataaggaatactaatagcacctgccttgtggctttgaaaattacatgatgtaactttgtcaagagcttagatgagcacttgggatatggcgagtgctcaataaatgttagtttaccatcatcatcatcattattattattactgattgcaagcaagacaaactggttctcacttcagcagaaaaagaaattactgaagtaattttggttagatcacagatttaacgtgaaggatgaataaccagacttggaaaacaggtggaaaccaagaggcagtcagcatggcatagcagccagcacttcaccagtgtggtgccttgggggcagcctggcaggagccactgccttcactcctggactgcagatctaccacaggacagcagactgaattgtcctatgtccagacttcacagtcacagggagcaggctgcatgcaggtggggcccaggtcacctaccttcaccctagagtctggagccacagaaaacagtaattgtccttgtagcttttgtgatggaaagcaagtcctgacacccaccaactcacatactagggaattcaccaaatgtaggacggcagctaagatgctgggaaaccaagaattaacaaatgagtattacaccaattagttaattcattacagatttcaatattttccaaaaaacatcctacaaagaacagctcactttaatatactccaacaaatgatgaaatctctccttggtcatcagcttttctaaatttctgtaactttaggtgattctgaatttcttagtgattctgaacttctagaagattctgaaacagaacagtcttactttgggatgtattcaaatcctagagatcagtcacatcaatctgtgccctttttcattatgtaacatgaaacaggaggacctttccaacttgccttgggaacctgctcctacaacagggtatattatcacatttaataaagaaagagtaatatttgcattgtgacccttcatctgaggtcatcgggactgtgctgtcctcccaagctccactgtaaagggatagacaacaaccttgtctcccagtcattgtaatctgtatcagagagcatcattagatgaatgaagatggaaatgttctcacggtcagcaggtggggaaggcaagacttgctgattggaagcaatgaaccatagttcattctaaggcttggggagagcaactttgaggaaatgaggcccctaaacttgccatgtaggagaagttggggggtggtaaattgggcaccctttatctactaaacgtaatctttacttccccaccctctaatttttctcagttgggcttgaaattgtttttgcttgttacactttatgggaaaagaaagggaaatcctaataaggtccatgccagcaaaactctagaagaagaaactaagaatttcaaattgacagtttgttaatgagaaaagacaaggttaaaggattttgttaaacagatgaccaaaataattattggaaacttctgcttctggccaaggtggaataataagggctacatttaccttcccaccagaaaatataataacaaacaaaaactggacaaaacactggacatgacactgttgtctttaaaccttggacatcaatcagtgcaggatgttattttgtaagaaagggaaaaaaattggggtgagccttctgattgtttccagactggagagaagtttcaggccacagcaagtggggaggaacctaggtgtaagtatatgtataaggtagcacatcatagtggccaaatgaatggcacaggaaagaaaaactacaagaacagaggaggtagggccacaaaactagagtggggtccaagattcactatggataaaatggggtgttaatttggttttcaaggccaatacaagaggaggcatagaaaaagaacaaggtggtgttgggaagtagtataaaaaggggcacaggcttatccttgttttataaaaaacaaaggtttttggaagggatttgtagagataagtttgaaaagtagtttgagactatgtgtggaaattcatgaatcttagagtttgattttattcaggagatcagtagcttttaaaatgtaaaataaaaccagtaaactctatctaaaataaattcttcccctaatcccaatataaaaaatacatataaaagcgtagctgctctagacaaaatggcgggtatgagatgaccagaaacctcaacagcactacctctggtagccccatagaactgccaagagttttcagagtatagttaattcctgctgacggctaaggcagtcattgagtgattggaaagaagacggaagatagacaagatcagttaattgggttggagggaagactgaagataggcaaggtgacaaattaggaactgttgcaatgatctaggcaagaaggaacctatgaactaggagggaggcttaaagacagcaaggagggaactataggcagggacatgtgaggaaatgcttagtagttaaggtgagtttgtaggtatgaaaggagagaaggaaagaacattaagtagcattaagtgaaccagataatttatagctccttgacctgaaacatttagaggctgtgataacactaataataataatctataattacataaattacgtagtgtaatgatatatcatgatataatcatcttaccaatgctttacagtcaatgacattgtggtacagagactttggaggcagatagacctcgattgtaacctctgtgctgcccgtggtatgaccttgagcatggtagttaatctgaacttctttcttttctgttaaattggggacaatgacagtacttaaccttatagtacttgaagggagagtgttagaattgatactggggagtctctccacagaaagttgtattagttattgtctttatttcattcttaatgaattagcactcccgttttctttaacatgttgaatttaaaacctcttagtgtatttctttgtcttgccttttaataccccatgaattattgagaaacaaaagaaagtgattatgcaaatgtttgaaatatctaataatacatgaacgtagtcatgggaaactggagaaataactttactgatattatactagttttttttctggaagcatagcatattaagaaaactcatttcaatgaaagaaaatttaaaaattagagtgcattagaagcataatccaatgaattctattcctaatgaatactcaggcagtatgttaactttttctgagatacaatagccaagccaaagaatttaaagaatgaaaaaaacagatgattaaacaaactgtgaagtaattagaggtagtctttgaaaatgcctcattaggcatttgactcattaggacagatccttttattttagggccaggacataattatttaagcagttgatgtgtctttagctcctttcaccttgccacaagttgtcgcctgtactgcctttccacctagcttccaagtccaggccgactttgaagagattccttagggctcacctcccctggagagtgccctctgtaccatctctctccctttcctcctcattcctattgcctgagtttattgttttaataaattcccataagttaacacctcctagggtggattagaatcattcaaatccacattgattgttactaagtagaaattttatactgagcctttctaaatccttacaacaacgtgacgaggatattatagttgctttaacccaaggagatgaaattcaaactggtggcattgcacacttacagtgggcttgcaggatgaaagagagcttggtatctcgatcccttatacaaaacaggtgggtcttgttagaaaaattcttcaataattgttaaggttaaaattttgaaaagtggttcaaagaaatttgctttgatgcaaatattgtctagtcagttacataacttgagctataatgacagtgtacactagctatccagggcacgacatctctattgtgctgttgaatatactgctcaaccattctggaaaatggcatgttcatgtatgaatgacaatgtatcttgtgtgtatggcattccaagccaacatgttggtccctgcaagtaaacttcttgactgtcaagaggctgcctgtttaatatttgcatgatctaaactaattgtttcctttgtttttttcctctgctttatgagctggtagtttgaccttttggcttttcccctgagagttaacaaaagttagacagttggggggtgaacttaagtaaaatccatatcactctatgttgctgctctactaacaattcaagaaaatgtcttggtagaaagcaaggaatgagttttaaattttctctttgaatttcaattatccatgccactcctgtggtccaccattctatataattaagaataagctgtatgttccatagtgacacaggctgttatttctgatttgcagttttcacttaacctagggtaaaattgaaatagaagtcgcatccttttttttttaccttcttccactcaattctagttagatatttttgaacttctataaaatgtctatgcaatattatcaccaataatgtgcaaaattactactcccatgtagaagaggatccattcttcattgaaccatacccttgggatcctatcacatgcagttggccatataatattttatattattgtttttttgttttgtttgttaagtttgtacctacataatggattaaattcaaaatctctgtttaactgaaacaaaatctgtttaactgaagcaaaaaaacaaaatctctgttttttgtttgtacaaaacaaaaaacaataatatttttgttttgtttgtatacttcatagggactttggaatttggaaaatatcgttcatttagggtatatatattagtccattttcatactgctataaagaaatacttgagactgggtaatttataaagaaaaataggcttaatgaactcacagttccacatggctggggaggcctcacagtcatggcagaaggtgaaggggaagcaaaggcatgtcttatatggcagcaggcaagagagtatatgcaagggaactgccctgtatgaaaccatcagatctcatgagacttatttactatcatgagaacagcacaggaaaaacctgcccccatgattcagttacctcccactgagtccctcccacatgtggggattatgggaactacaattcaagatgagatttggatggggacacagccaaaccatatcagtacattaaagaaaatatttgttagcgctaagtgaatctactttcacctacttgattatttgatgattttataaatagtcatctctttcctcatctttccagtcgtattttgttgttccaaagccaaaacctgtgtgtcttgtattcaacaacctgaatcatacagttgtgagacgtaaatgggtgtggtggttccacttacttctttacatagtactacaactaagccatctaagtagtctgctcctaaattcctccaagaagggaaatatcatgatttgatttaaatgtgacatcctttcttagagaagttttctttgtctccttcttccccagtcacttcctcccatccactgtgctttcggcagttcattcgttcattaattcattcaacgaatattgaataacttttgatcaatgtcttcctccctccaagctgaaaacttgatggagggtaacatgatctgtctttgtttaccactgcatcttccgtgaatatacattgtaagtattgaacggatttttactaaatgaacaaatactttgataaaatatttttgattactgccaatatcagtttctgaattgattctaaaattcttctgctggaaagtagattagcgttagtatgactgctgaagccttttaaagtgggtggtaatactacgtttcgttttgtttcattaacctaagtgctgttctttggaatctttttaaagtaagataaattacattcatgaaagaagcatattatttttaaagtactttattttggaaaggtaaaatgcttgtgtagttataatttggttactcttgatttcaccttaggaaaaacaatatcaccttctaaccatttcttttttagtcaaatctcttgcttctatttctctctgtagatccgctattaaagactgtaatcactgctgcatctttcctgtaaggcttgatcgcattgttaatttctttctaaacttgtagagtaggtgtataaatcgtatttgggtaatacactgactaatactgaagaaccaggcattttcttaccccagtcctcacacgaagtagggaaatacaagtcagaacttatcttctcaaaactctgacctcagaatttcctgagaaatctgaacctaaaaagattctttgcttttgacattttttctctggtgtccaccgcaaggctcttgctcttacattttttttttttttctaatgtttcaaatagaagatggtagagtcatatagtacaagctcagcatcggaggggctactggaggtcaactagtgcaaatgctttctgaataatggaatcctttgggaatacccccttgaaagtcttcatctagcctcttcttggaaaccctcagtgatacccctcatcgtctcctatgatggcagcttctatctttgtcgtcagctctgactattacaaactgcttccttacattgagctgtaactaactaaaaagtttccacaccctgcttctattttagcctttgggctcataaagaacaagttgaacccgtcttatgcagaacaacccatctacgggagatgctcaggtttcctccatgttttcctttctctaggctaacccttcgttgttcctcacttactcactatataacctgatttcatgtctccttacccttcttgttactctaacttgagtaggctagtttcaggatccagcaataagtgtgatacatcaggtatgctctgatgagttgagagtagagtggacatagcatctcccttaattcagatattgtgatctaattggcaaatctggcaataaaagttgaaatgcctgatccaggacaatggctggtcaggtgccattgttctcatcttttacttttaggtgtccctcaatttgttaagttagtacctacgtaatgtcctgaaacttgttaagtttgtacctacataatggattaaattcaaaatctctgtttaactgaaaacaaaagcaaacttcttttcagagccagaatctggaatcatacgtaacagagaatgatattgtacaagttgcttcatctctttaagtaacggtttctcaaacttacaagattattgtgagaactaaattagttctaaagtgcttccatgtaaagtgtatgtaaatgcttaaaatatatagtaagtgctgaatgcatattagaaataataataatctttattataatttttactatttcatgagaagtacttattttaatactgagcaaataggaagagttcatggcttctctatgtttttgaagtgtcatttaatatattatatatataaaacatatatatatttcagtcacacatttgtccaaataccttgacaaattaaaacaaaataagacaaaattctcacgctagttatttgttataaagtaatagaacaagtgatatgttataaagagcatttatttctcatgtctttgatattaaaaatagttgtattaactttttatcaaaacgattgcttccttcatataaatctaagaattatgctgtctgataaatattggagagattaacttctttgaaaatatagaagctttttgtctttttaaaatagttgtttttttgcagatgttaatacatttcagcagtacagtatggcctttttcaggttaaggtgctgagcccaaacctcaaagaatcactgcaaaaagattggatcccccctcttcaccccatttcgtaatttagttagtgagaaccacaactggctaaacctttgtggggggccgggcactgtggctcatgcctataatcccagcactttgggaggccgaggcaggcagatcacaaggtcaggaaatcgagaccatcctggctaacacggcgaaaccccgtctctactaaaaatacaaaaaattagccgggcatggtggcaggtgcctgtagtcccagctactcaggaggctgaggcaggagaatggcgtgaacctgggaggcggggcttgcagtgggccgagatcccgccactgcactccagcctgggtgacacagcgagactccatcttaaaaaaaaaacaaaaaaaaacaaaaacaaaaaaaaaaccacctttggggggaaattatcaaataaaacaaactctttttagaattttacaacttttatgttaggaaaaaacaaatacatttgtgaaaagcttaaaatccagtaaatgacttgagggacttggggcaatcctagggtgatgaggagcaggttagtaacagtgaaggacttagcaccccagggggccagaggctgtaatataccttatgagcaagtcattcttatttagtcttgcccattaagaagtctacttggactaaatgcttttaaaaatgcccttttaatttactattaaaagaatattcctagcagaagtagtcttggatgctaaattctattttaagaataactaaaattagaattctgttctttttataacacctgttacacacacacccctacctagtgtgtcggaatcagtttgtatgggctcaccaaagcctactgttcaattttcaggagttttgtaagccatttgatgtcagacaagtggcctgaagtttgttatggtggtggtatttacaccatgaaaattggcatgttatggtggtagtatttacaccatgaaaactgctacaaatagaaatctttttcttcttctcttggagagccacttgttgaacacttaccagctcacctgtgcttgaaagtatttcttcaaataaaatgaaagctggttagctttgaaaattttttgtataaaagtttacacgggaaaaaaataaactaatttttttttccacctgtgttttcagggatacgaaaagaccgaagaggagggagaatgttgaaacacaagcgccagagagatgatggggagggcaggggtgaagtggggtctgctggagacatgagagctgccaacctttggccaagcccgctcatgatcaaacgctctaagaagaacagcctggccttgtccctgacggccgaccagatggtcagtgccttgttggatgctgagcccccgatactctattccgagtatgatcctaccagacccttcagtgaagcttcgatgatgggcttactgaccaacctggcagacagggagctggttcacatgatcaactgggcgaagagggtgccaggtaagaatgcgaagcgcagcttttaagagtcaatagcttttcaagaacttgttgtgatgtcatgggagaaatagtgggggaaaaagaagcaataacatgttatgtaattggtttcaaggttacaggagatgtgttcattttcagtatcaatacactgtaattttccaggagattaggaaataatatttttaaatcagaatctagaagactgaaattcttaaattgacataatttatttttaacccatctcatttaccaaaaagatttagggtggacactacatggtaaaactatttaatagtgtatgttcacagtagcagaaacttttaacactaaatgaactacaaaagtttgtaatattaatgacctttgttgaaaacatctcaattattaatcaaacgattttatcttaaaaagatttttaagattcggtgtggtggctcgtgcctgtaatcctagcactttttggggctgaggtgggaggattgcttgagcccaggagcttgaggccatccggggcaacgtggcgaaaccctgtctctacaacaaatttttaaaaattagctggatgcagtggcacacacctgtggtcccagttatgggggaggccgaggtgagaggatggcttgagtccaggaggtcaaagctacagtgaaccatgtttgtgtggagtgccactgcactccagcccaggtgacagagcaagaccgtgtcataaaaaataaaccacacaaaaaaagagaaagatctttatggattaaaaagataataataagtgtatttactgaatgccaattatttatccaacctggtgtatgcttagtgttttaggagaaagagaaaggcaatggaaaaataaattaaggtatcatccctgaaagaaacttttagaaagacacagtggctgaagtgataccttgttccttcagttgattctctcagaactggtgttctggtaaaattggactgttactcctgttattcagggagaagaactcaagtttgtatggcaacaagactagaaaatgactttctccctgccccagtgtattcgttcaggagctaatgtagataaaccgaggcaagaagaagctaaattttttttctgggcttataggttaaatgagtgatagatttagttggaggttttctcatttggtttcttttaatagatgaaattaattgtttcctatgaagcatgaaatgttttatatgaaactaaaaaaatgtggagtttgtacttgcatttcaagggtcactgctctgttataggccaagtgaacttatgtctggccttagagaatcttacatgtatttgcatctatcagtatataaacatgtgggccgtagaataaggagccagcagtaccagaacccagccttgttagaggccaccattttggtggttgagtggttattagtttacatggaagcatggagaataataggcaaatgtaggttttcagtgtcagtcgaactggcaaacaaaaatttctggtcatcttcagaatgaaaagttttcttgagtacctacatattttagcattttcatatgaagcagatacattataagttaattgttggaatctaattgtaatatggctgtaagttttttctttatatttgttattgccttgttcttatattatagggaaagagaaacaaacaaacaagcaaagaaactaatggtcatatatttgagagccaactcttggttgctgttcagttttattttcctgtaaacatatattttcccttatgaaatcttgggaatattagctctggagcactgctgaactcaagtacagacattttcatgtgtatcagtagattcccatcatgacatttttataataatgttgaagagcattttaaacaactggaattaagctcaaatacattaccagtggttgaagaattcacatcaataatcttctgaatttaggaataaaatggagaagtcaaggaaaggaaaatattatacacaggctagcaatagttaaaatacaattattaaagccagagctagacaaaattatggcaatgagatgtgtaacaaaaccactctgtaacttcatcatgttcgtttaaaagacctgaatgattccaaaatccttagaccaataaactatgtcttcttacttgataattaaaaaaaagaattataaaggcaaaaatgaaattatatgtatgtgtgtttgtgtgtgttccatgggaatacagctgttgtaaatcaaaggcctacttgcctgaccaagcagaataaaaatagtcattgattttaaagagactaaaagtgagggaagaaaaaagtcttctgcaaaagctctacagatggttgtcaaacttttcagaaaaatagacaaagcaacattttgaaaaggatttatatcttttatatattcaaataccatctgttatttaaaaaacatagcccacactgaatatctgatatagacaatataacgtttatgagataatagtttgagaatgacaataataatagtaagttttaaaagaggaaataagccgggcacagtggctcatgcctgtaatcccagcactttgggaggccgaggcgggtggatcacctgaggtcaggagttcaagaccagcctggccaacatgacaaaaccctgtctctacaaaacagtacaaaaattagccaggcttggtggcacacatccatagtcccaggtacttgggatgttgaggtgggagaattgcttgaacctgggaggcagagactgcagtgagccgagaccccacaactgcactccggcctgggcaacaatgagactctgtctctaaataaataaataaagaaggaaatagtaaatgtcattagtaagaagaatagcaaaatttcagttctagaaatacccagaattagctatatgatacaaaaaccctcatgaaacatttggataatcctcagaatacctatcaatataacaaaaactatgaattgacttcattttgaatgatgaatttttaacaaaaatagtcaatactttgggcttagtagctctagaagtgcttctttcttctttcttttaattaacagaatattgtcagaattttcaaatgttgatgattataagttgaattttccttttcattaacccctggggcttattttttgacttgatatgtttctctactcagaattaagatgtgaagagctttgggatagaatgcatcatacaagtgtgagagtcaagttccaatccataaagtacttctggtagacctggataaagatgaccttaagaaatgattttttttctctttgcagtttaaaaacaacagtagcaacaagaatgataaaacctatgaagccagctctgacaaaagatgttttttttataacacatactatgtatctactttttgatatttatctatcgagaagacttttctccttattgtttgctctgaaatttgtttatatttaataggaattttatagccttatccctgggtagaaattcagtttttttaaaagtagataattaaatcttaatttactattattttacacatggtgaaactagtcaataaatgtaatatcattgagctgaaggttaaaaaggaaaaaatatgactgcaagagtggttgtatttttgatttcagcatcacactcaattgcatcattgagtggttcattcttagtttcagtgttaatgaaatacatctgagtttttttccccagaagcttgaattgtgtcaccaaagtgtcattttgatttattgaaagttaagccctttccaaaattcaccataattttacatgtctcgaaagcaattttatacttcaagtctgtgctatagttctatatattttatgaagatttggatagatatctagccctgagttttttattgcctgttaaatacttataacccaaagtgtagcagcctcatgaactgctgctgggcacagatctgggagagtgcactcagagtgttggcccaggaagaggaaaagaggaaaaggggcagttcagtggcagcttggcttcctgtgaaacatgtcaccttaaccacttcctcattcttttagtggcaaactagacgaccttctccttcccctttcctgccgagtccccctctaatcaacactctagaaggcccctcttcctcctcagtcctgactccctgtcatttacttcaggttgcctccttgctcagttttggccccaggggtaggcaatctcctctttctggacatgtctcccaccagccccaagttcagatttcttggaagtttctgtgttgtctcgaggatgcatggttgtgtgagttattccagggctcaaggcctcttctgtgtctgtattccccaggaatccaggaattcacttctctgcctctcatcctcatcctcatcattaaaatgagcagatttgagctcaggaagtgcttgaataaatgaataaatgaacaaatgaaaggtgatttttgaaagtcttaattttaagaagtctctgagccctgttacagctcaattttcccataaactagaactgctctctaaggctgtgacatttctcctttttcctctcctcaaaatctacctgctgttctgatatctccctgacagccaccatagtgagattctatttccatttccaatctctcttttgtaagggacagagaaacagctagagaaatatggagccatgcgctctgaggactttagcaggcttcaactctatctgcaagtgagtttcacttagcgaatgaaattggaaacttaaagtgggtagggatgagggttcccggagaaggtgtaatacctcagtctgggaattgggagcatctacaaggaacacactcaattctgggaggttcctgtagatttcagagatttagcagggcttcccagcactctgcttcccaacctgtcattggaccagtaaaccctgctctcaaactgttgtggtgtccagcatgctttggcaaggtaatgaaagataacatgacatggacatatgggtgacatcctggagagatgacagaagcctctgtttaaggacaagatttgccatttagattttgcacccactgtataataagagccttaggattgggctggaatcgccctagcaggcatgatggcagcccctctggactggcaatatgcagcttttttgcaagtgttccatgtccaagtcaccccacccagctttctactgctcccgtggaagctctggtgaaacgcaaggaaagcagctgctgttgactggatttttctttcacatgaaactttgaagcctcatagatgcttattggcctggatgctattaaacctttaaaaatccctttctcatcttgagagtatttgagaaacatgtctggggcattttgcccaccctcctccaggttctgtgtcagtgagtgatatggtttgcctgtgtccccacccaaatttcatcttgaattcccatctgttgtaggagagacccatggcaggtagttgaatcatgggagcaggtctttcccatgttcctgtgatagtgagtaagtctcaagagatctgatggtgttaaaaaggggagtttttctgcacaagctcttcttctcttgtctgccaccatgtgagatgtgccttccaccttctgccatgattgtgaggcctccccagccacaatggaactgtaagtccattaagcctctttcttttgtaaattgcctactctgggatgtgtctttatgagcagtgtgaaaacagactaatacagtgagtctgggtcagtgtgtgtttatgttgaacgtagtggacttgtggtgtccccagggcaccctgtggggaatgttggcctgtggctttgctacttccagggggatttggcatggagaatgtgtgttttaagtaatagatagattatgattgaagtgtgttatgggctgagttgtctctcctcaaaaagacatgttaaagtcctaacccccagtatctcagaatctgaccttctttggaaatagtgcctttatataggtaatcaacttcaagtgaagtcattagcacaagccctaatccaataaggactggcattctaatgaaaggggaaatttagacatagaaacagacatgcacagaagaagatgatatgaagagacacaggaagaggacggtcatgtgactggagtgctgggtctgcaagctgagaaatgccaaggtttactggctaacatcggaaactagaaggggcaagagtggactctccccctcagagagagtatggccttgatttcagacttctagcctccagaactgtgaggcgtacatttctgttgtttttgaagccacctagtttttgatactttgtatgggagccctaggaaattaatacaaagtgtattaaaaatagaattttcttctattgtatttttgaggcaaaagaaataaggagctattgatttaaggaggaaggtttggctcatctagtatagacttggctaatcatttactcttgtatatttctcttctgcctgcccaagtagttcactgaacaggcttagaagttgatttataattgtaagagtttacacatcagaagttaatttataattgttaacagtttcatgcatctacctcataaataccttgtaaaagattttacccttcagaataatgttttcctctggtactttagtagtttatcctttttttgcatctttgatgcatttgaattcatcctggtatgctgtgtgagctggggctccaatgtcgttttcctacagatggctccacagttgtttcggtttcattcgaacagcctcctacagaagtatttttcagacttcttttatacttgacttccaagtttactactggttaagagcttttaaagtagggggaaagatatgacccattggcctactcgtttgattattttttccaattctgaaatcaaaaattaaaaaatttattcaaagttatagtttcacttaatttatattaactgcatagatagtgtgattcatctgtcctgcttggacatatttagtaacttttaattaatcttagagataaaagatagaaatctatgagacttgagacattcaaataagaccagtactgataagaggtaatcaggtgaagtgccatttggttgtaataggacatcaaaattgttccccaagagtgaaggatgttccattctcacttttcccatctgtcctcccaaattctttcactcttcctgatgctttgaaccaacttgaaaagttagtccactcagaacctcagctgttaaacttttagcctctgcaaacaaactagccgttttcctctttgtccctttaccatcaagctcagttgcttctcctactcctctcccttctgccaggggctccacccttgttcctcattcaacagtggaatcatctgtgtgcctgtctcctctttactgtgtaccattgggtcctcttcttcaccatctctaaatttatgcttcttccctgttccactgtcaccagcttggtctacatcctactttgatcatttggatttaggtcccaccctaatcgagtatgacttcatcttaacttgattgcatctgcaaagacctgatttccaaatacgaccacaagtaaaggttcaggtggacatgaatattaggagagacagcacttcaattaacagtttggcattaggactttattatctagcttagtaattgttttaacagataaataatagtatcccctaaagtttaaaatgcagaaccagattatgcctcagggtgcctaacctgagaggaagagtctttcttcaacagactctgggaaagacctttgtaaaaaggctggtgaccattctatttgatttctactttccaatattaactgcttaagtcagacaatctccttggcccacgctttcccctgccattctccccttcacataatgtcttcattttatttttcccttgttttattccctgaactcccttctctctattcagattccctgcccattttttctcctaatgagacgcctgacttcctacctcctttttgaaacttcaaactgcttagcaaatacaattttgaattgagtttgctgtcacagaacaaaaactagtccttggtccagagtatcttgcaggactgaatcaactgtggtctaagacacaataataactcttaattattttcttgtttccttcatggtatatttgttgctggatgatgagtttatattatggttgaatttcctttttgaaatgaaaagatgaatagtctttattggctgggtatctatttttatccagaagactttgcaaatgagaaatatttctacaatctgagtttaatttgcttaagcaatgaacttgttctttaaaagtcgtatatgtgcaaaataaatttaaattaaataaatcatattttaatgtagtcagggtagctttcatttaaataaaacctatgacaaatatccacgtgaagttatcactcctttaacaaaacaagtgttctccttttttattgaaatactagttttcacaaattgagattccttaatgtgatgaccgcttggactgactatagtatagctgcgttcttagaatggccctgaaaccacaaggcctctccaagatgcatgtggctgactttctgaggtgactgcattgaatctttctggcttagcttattctgcatccagatccctggaagctatttatccccaaacagtggtatatttagacccattgtgtgctaacctctctgtgccctaagtaccaacatagccaagccaaagttcgaactttgctgccttacaatggaggttacatcgtagtgatgaaagaggttaattttctttaggagttgaagaccagagaactgcaaaaaggggagaaaatcagtgtggcctctaatgagagctaagtgagtgaggcaatagaaaacagtgaggaccggccagtgcggtggctcatgcctgtaatcccaatactttggaaggctgaggtgggcggatcacgaggtcaagagatcaagatcatcctggccaacatggtgaaaccctgtctctactaaaaatacaaaaattagctgggtgtggtggtgggtacctgtagtcccagctactcgggaggctgagcggggagaatcgcttgaacccgggaggcagaggttgcagtgagtcgagattgcgccactgcactccagccggagtgagactccgtctaaaaaaaaaaaagaatacagtgaggaccttggagggaatcttacagtggagcagaattaaaagagaagaattcacctatttcctatataactccctctgtaaccgataactttctagagaaagctcactgaatatatttgaaatttgtttcataccacttttatgttattgccttctttcacaggaaccagagagctctaacctgtagatttgctttgttgtctttactttagactacagcctaaactgactgttgatttttggcacaattattacatctctcctttcaccccgcctctagccctttcttaattacccccattaggcatttttcttgctagcgtgaactaaatcccctgtctcaagcacgcgcctgtacattgaaatagaatgttaattcattgacgaaattaactgttcttgattgggaacccctagttccagggaatcttaaggtttcaattctgttgccttggttactaaactgttccatgcagtttgctcaactttgaatggatacttctcttaggaacattctcccttgtaagtaaattgcttgacgtgttaaaatctaagttctgttttacaattcttgagacaaattcaccatgatttagttttaaaaacaagtggccttgtccttttagtctaggatttatcacttagctgtatctagcaaagcccctcacacaatagtaggaaaaagcagaagtgtgattgctaaatgaaggggaaatgtaataaaatgatggaagtgcccttttttagggggaattaaagtttctctttgtagtgttacatgtattcattatgtgactttcataaatacaaaccccaataaaacggtgggcagttccgtctctggagatgttaagtgtctcttcatagaataacatggcacatcataacatttgattccttttacctggtcaagatgtttgcttatggcatttgaaatgcatattttcaaactaggtagatgaatggtttaaatataaaaattcattcaaggccctgagctatagaagaatatcttccaaaacatgcattcaagttctatctgtcagtgtttttctttttgcatcaataaggcagcaatggaatacaatcagatttattttttctttattgctgtctacaattcagagatataacctgaaaaatatgttgtctcttcccaagtagatcttgtaattctctgaactgtgatccagaccaatgccgcctttacattgggtctgtggaagtgggagggtccactgaacctggttatgagaggtttcaaattgaaaagatttacaagtatgtaaataaaatcaaatagtcaattagtatctaacatatacatgtcaaaacacatagccccaatctcataaaatcaaagagatctacctaaatagatttgtttgcctaacaaatagcaagaccactttgacagaatctttagcatgacagtgattgtcaaaatgggtaaatggttattattgcccagttaagtaatttctgatttgctttgccttgattactcttaataaactaaacttaacataccatagaagcaatattttttaaaaagagggtatattctagagctagatagggtgttgtgcaacaatgtgaatgtacttactaccattaaactgcatacataaaaagggttgaaatggtaaattttatgttatatacattttaccaaaataaagaaaagttataatactttccgtagcatatataaaaaagaaacagacatttcatagcaaaaataggataaaaatgatattaaattcataggggatttctcttatctaaaactttagatttgattcttagataagaatataaacacattgcaagaagataaatcaataagccaatgaagtaaggtggaataaataaatagaaataggtgatacttgcggctctgacagcatctgataataatagtacaaacagtttcatttcatttaacagttatttgatgaactcctgtgtgctaggaactgttatttaaaaaaagtaacttttattttaggttcaggggtacatgtgcaagtttgttatataggtaaactcatggctcggggcttggtacacagattattttgtcacccaggtactaagcatagtacccaacagtatttttttttccgaacctctcctcctctcaccctccctcacgtaggcccagtgtctgttgctcccctctttttgtccatgtgttctcattatttagctcctacttataagtgagaatatgcattatcaggttttctgcttctgtgtcagtttgctaaggataatggtctccaattccatccatgttcctgaaaaggacatgatctctttctttgtttttatggctgcagtgtattccatggtgtatatgtaccacattttcttcatccagtctaccattggtggacatttaggttgattccatgtctttactattgtgaatagtgctgtaatgaacatacgcgttcatgtgtctttatggtagaacgatatataatcctttgagtatatacccagtagtgggattccttggttgaatggtagttctgtttttagttcttttagttctgtgtgtgaaaacacaccagagaacaaaattgaccagatctctgccttcacagaacgttcattctactgtaccagttatttcatgaggaatatgaatactgttattactctctgcccatttcacacatgaaggagcagaaatggagcagagtttactaatttatctgttgcagatagtagctaattgtgtgccaggtgctgttccaagcattttacccctgttaactcagctgagtgcttttattttccccattgtatgcccaacttatggatgacagcactgaggtagagaaaggttaataacatagaatagtttagtattagggaaacaatttgaattctaggacacttttactgaaacttagcataggctaaagaagtgatcgtgcatgtttaaagagttgtatcattttatcattatttgactttcttttccaaaaaaaacaacccttctcctttctctctcttccatgtgacaaatacatgtctgtatacatacatatatatgtaaatataaatatatataaaaatatatataaatataaataaatatatatatatatatataaatatatatatatatataaaatttttttttttgagatggagtctcactctgttgcccaggctggagtgcagtggcatgatctcggctcactgtaagctccgcctcctgggttcatgccattcttctgcctcagcctcccgagtagctgggactacaggtgcccgccaccacgcccggctaattttttgtattttttagtagagatgggctttcactgtgttagccaggatggtctcgatctcctgacctcgtgatccgcccacctcggcctcccaaagtgctgggattacaggtgtgaaccaccacgtgcgacccacatgtctgtatattacagccgttgaaggacacaacttttgccattgggcgacccagtcccctagtaagtgttcaaaaatattcgctattatcattgttggtgatttcgaggatttggatataattaatttgagcctaattttttaagactattacataactatacaaaaaaatcatgagagagcctggaattttgcaaaactaggatagaaaccagtttctaaaaagcattttaaacattcagcttgtgtatttcttttcacttgtattttgtgatctgcctccatgctttcatgcctttctcttcaaacaatcttattaccactaaccaaaaacaattaaaatttgattgttttgtttttacatgttgttacagttaagaaaaaaaaattctaggtattgacccctgccagttttcggagttaatactaactagtgatttggggctacatttaagtgctttaagctatcctacaagcttaaagtagttatacatgcaaatacttaaatgaattaggtacaagaatacagaggtaagaaatagaatctattgtagaataaatcctatttcagatgtgactgttttaggatttgaatcaaccacatattacagaaaaccccaagataaagccttggcataaccaagacaaagtttatttttttctctcacataaaattagtccagacttattttaccagtggtatggcaactccacagtcaaagggacccaagctcatctgaccttcgattcccttatcctgggacaggcttacattctcaaggtcgactcctggcctaatggggctactggagcttcagccatcacactctgtgcttcctgttatatctactggtcagaacttcagatacatctgtctaaaaggaacgctgaaaatacagtctttaagctgtgcaattgtacctggaataaatgagttcttttaataaaaagagttgaatggatatttggtgggcaaatagcagtccatgctacaataataaacttcacaattttagaattagatatcttgtaatgaatattctgacgtggtgtcaacttataccatagatagattataactttgaaaaggaattagaacacaataataataaattcacactaaggctcttttggggaaaaaaaatctctaccatttattgagtgtttattatcttcacaacatccctatgagttagggattatttttgtggacattttacagataaagaaacagaggcattgagatgataactagcttgactaaggagtggcggagctctgggcagtgtggttcctgtgtgcccataaggccattgcacaatgctgcttcatcatgtaattcagaaagtattgcaggatgtggcagttggtcatcatgaatgttcattgttatcttgtggctttgtgaaaaattctggtcattcaaacgatttgactgttgagattctgtgcacatgagattgtactgtgtacatgtttctaaaaatgtgtgttatagatcaaaatgcacacactcatttacctctaagaacagttcttatattgaagggaaattatctgtacgtgagagaacaacgtggttttgagtacaagtggtgaacagacattgaatagttgttttcagaaagcatcactcccctgtacctcagaacccagcctcagtgctggttgcgagccaacagctttgatgtcctgaagtttttgcatcacttctcttttgcccctctttgggattcaaagatgataagtttgaagtggagttctaccgcttccattggaagagaaaaagtttccgtgtgtgtgtgtgtgtgtgtgcgtgtgtgtgtttacggagaggagttctatgcatctgcagagggtgctgccatcaacaaggagaacagagtgggatgaagggtttgggaagccaggatgggcatctctgacgagctccagaactctccacctaagtgtgcaagtgtaaacactccctgatgtgtgaactggccatctcaagactaagtatttagcaggaaatgccccctattcaacccttgccttctcaggtgtagaggttgggttgtctcttccatctttgtttgaattatgtcattaatcaaccttagtgaaagatcacttagtcatttgtgacagcataagttcttaattgttaggaatcactggtgcggcacacatctttttctatccatgaacaacgtcaaatgcttattttctcatgagcttttattttttccttttaaaaaaagtttcttaggataaacacagcctttttccttgtctctcccttgccctctcatctttttctcaatctttatattcctatatgtcactgaagagtccccgtgccaacgctgtgcagtgggaggctcctacctccaccagcttttgaggaggttgtagtcctgcaaccttagaggttccacagccaagctgggggtctttctggagcatgggtggtgaatctgagatctatgcacccaggaagcctgacacattattgtggtgtctcaattcttttttttttaattagaaaaattgtatcaaattgcatttggtgagagcaaaaataaactgaagttggttgagctttggaagactacaagccactgtaatatttaagatttcttgacctccagaactaacatttgtcctgtcagagaaaataattactcctgttgagaatacatgcattaaagtaagatgttcactactctatatgatcaccaaacattaaataatatgttttacacatgtatgtactatgtgttcaagtgtttataaatccatggagccaatagaatgtaagttctatgagggcagaaattttaatccattttgttcctagaacagttcctgacacatactggtgttaggggtaggtcttcagattttatggatcaaatggaatctccacacttaaaaaaacttagagaaaaactgccttaatgtgcccatagtctggttggaaatggcagctccaggttcattgattgctttgttcattcggcacttttcactggacatgctatgagcccagcagtgttctgggtttttgggatacaccaagccctgcctccccggtgcttaacattctagtgggggagacagaaagaaagcaaacatggtggacaacttaattatctatttttgaaagttgacaggaactgtggacaaaagaaaacaagagctggagacagcagtgccagggcagggtgagggtcaagttagagtaagcctcattgagagatcttttgagcaacacctgaaggaggaggtgagaaagttagccatgtggagggagcagcattccaggcaagtggcccaccaagtgcagagtcctgacagcaagagcagttctggaatattctagaaacaggaagaagaccaatgtgactagagcagagtgaggcaggagtgagagaaaatgtgatcaggaaagtaaggtcctgtggccactaagattttggcttttattctgaaggaaatgaggactcattgcaggactttgagagcatgatctgacttgtcacaagtgttctctttgtctactgggttgagaagacatccaaagggggccaaagattgaggcagggagagcagctaggacaggctctagcaatctaggtgataaatgaggaccgatggtggctctgacaagggtggtaatggagacatggtgaggagtgaccacatttcaaatatatcttgaggtagagctgacaggattttcccgatgggctgggcgtagtatgtgagagaaagaattcagttatggatgattattttgtcctgaacaatgataaaagttgagtcaacaactgatatggggaagtctacaggtggaacaagtttttgaggaggaaatcagttcagtgttggctatgttgaatttgagatgtttttagaccatctgagtggagaaatctggagtttaggagagaggctggacttgatatgatgttatgggtcctcagcatagagatgatgaatgagattagcaaagtagtgagtgtaaaaaggaaagggaaggagaccaaagattgagccttgggacagtcagaaagaagagagggaacccgcaaaggagattgaaatggaatccatctcactgtggcatcgtgaaagacaaatgaagatggtataagatgaaaaagtgatcagctgtatcaaatgctgctattgggtcaagtagggtgagaattgataattttccatcttgtcaagagcagccgtgatagagggagggggtggagatatacttggaatgagttcatgaaaaaatgggagggaagggattagaagcagcaagtataagcagctctttcaaaggagggagatggggaatggctactgggatgccatcacatagataggaaggtggaaccctgtgcactggaggagggagtgtcctcacagaggaggacaggcaggaaggtagagtgggctgctttgggcacatgtggttctgtggatgttctcttttgacagcttcagttcttcagggaattgggagcaagttcatcagctgagagtgaacatggggcagacagtgtgagaggtcaaagcggcaagagtagttgtgccacagtcttttaggagagagggaaagtaaatggaatggggaaggaaagtaaatagcatggctgctgagctgcgttacaagcccacccggtgttgggttgtgaggtgtagttgtgggctcttcttcagtcggattgtcagcatgggcggctggcagagagttgaatctgacagggcagcagttctggaaaatgagtatgatgagtcaagaaagggaccaggaagtggaaactgtgtgtgaggcagtgatgctgatgaatgactgtggaaaacaatggaggtgaggagggagtggatgttgagtggctaggggacagtgaaaagggagtaggatccactagcttgctgcttgtctcttataattaggatcaagagcttctgccgtcttctaggcattctgctgcttcaagggagtctctgagattgggttctgcatggatgtattgaaacatgcacctaggtgtgtttggagtcctgccagagacctgctttctctttattcttatcctgaggccctttaggaggctcagatggaataatttttatggtttcttaaaacccaagtgggttacctaagccatcatagttctgccccctgttccctgagaggaccacgggagcaccctgaaatgggttttccactctgccatcccccacttgcctgcttgggtgttgacctcagccatctacacatatcccggatgtagtgttgggcccctggttgatgtcattccttttcaaatgggatcttttactacagcaatccagcaacaaactaaatagcgatagagttttctttcccttacaaaccacaaccacaaccaagggaaaaaccaaaccaaaccaaccaaacaaacaaaacaaaagtatgtggcttcttaccacagccccctatctcgcccaagccttgtggctctttgatctctggtgttctgaaattgcgtaatcatgtgcttgctctttttcattcattgtgctgggcacacacttaatggaccctttcaagttggttttcttttatggggtaagggtaggcaggactattttttaagatttcttccactttgtcttccaattgttctaatgagttttttaaaattgtgcctgtcctgtttttaaattccaagagatattctttgtcctctaaatgtttcttataaatatatataaaatgaataatataagcatatagttttgcatagatttgagttcgctgttacagtgtccttttatttctctgaggatattcattataggttttttaaaaaacactttttctggtccccaaattatctcttctctctagacttcctccattcatgccttccttcccccctccctcccttcctttgctcttgctcttgattttggaggcttgtcataaatatttgaccatccattcattttttaaccataacgaactaaaaatgttaattggagccctgtgtgttccttgagcagaatgtttggattaatgagcttccgtgcaatgttttctctggaatggattaatttctccagatctataatttttcaatctctttccagggggtaaaagcctggttgtctgtttcatgaaagtaaaaatgtgggtaagagtgatcccagcattcagaatgcagacttagtagctgcttgttttcagtcctgggacttcacccaccctcaccacagttggtatcccaaagtgtgaaactccttagattatctttctcaagaaaatgaaactcagatattcgtgtcctttggccatttttgattagcttatttgttttcttccttttgaattgtttgaattccttatgtattttgaatattaaccccttattagatttatggtttgcaaatattttcccccactctgtgggttatcttttcactttgtcaattgtttactttgctgtgcggaaagctttttagtttcatgctatcaaactaattttgcttttgttgcctgtgcattcaaggttgtatccaaagaactcattgcccagatcaatgtcatggagcatttctcctatgttttcttctggtatttatatagtttcagtgcttttctttaaattttaatccattttgaatggatttttaatagggcataagtgtcacttccatttttttatatgtggatatccagttttcccaacaccatttattaaagaggctgtcctttccctattgtgtattcttggcacttttgttgtaaataagttgatcttacttgtgcgggtttatttctgggccttctaatctgttccattaattcatgtgtctgtttttatgccagtatcacactgctttgattacaatagctttataatatatcttgaaatcagagagtttgatgcctctagctttgttctttttgctcaagattgttttggttaattggggtcttttgtggttccatacagatttaaagattattttttctatttctgtgaaaaatggcattggaaatttgataggaagtgcattgaatctgcagatcactttggatagcatagattttttttaacaataataatttttccactccatgaagaggtatacttttttcatttatttttgttttcttctatttcttttatctgtgttctgtagtttttagtattcaggtgtttcacctccttggttgaatttaccccaagtattttgctgttgttgctattgtaaatggaattgttttcttaatttcctttttggataattctttattattatatagaaaagctatggatttttgcatgtttattttgtatgcttcaactttactgcatttgtttatcaggttttaacagttttttgataaaagttttggtgttttctgtatatatgatgatgtcatcagcaaacagagacaatttcatttccctattttctttctttttttttttttgagatggagtctcactctgtcacccaggttggagtgcagtggtgcgatctccactcactgcaagctctgcctcctgggttcacaccattctcctacctcagcctcccgtgtagctggggctacaggtgcccgccaccacgcccagctaatttttttgtatttttagtacagacggagtttcactgtgttagccaggatggtctcgatctcctgacctcgtgatccacccgcctcagccttccaaagtgctgggattacaggcatgagccaccgcgcccggcccctattttcttaatcacgcgatatatacaggcttgttgaaaaacatgaaaatgataaagaagtttatgtattaagaggcaaaagctatgatgttcaactcctctaaaaccacttcttagtaggtgaacattgttaaacagttttgtgaatctgcttccagattttttctaggcatgttcatacacatatacacacataatttatttttacccagttgcgatcatgtatcatctgatccaaaactcgctatttttcagttaatatgcagtgactgtctttccaaaccatagtatatatatatatctctaagaatttttcaaatctgctatagtttttaaacatatttattgttacatacatatgtgtataagttacttatttgcttatttctttgaatatctttgtctagctttggaatcacataaataatgagtacaaatggtaaagaaatttcatgtggaaggatatatagaaaaagtacaagtctctcttctcatccactctatctcattacctaaaaggttatccttagagctttatataatacatccctgaagtttagatcattttattgcctcccaattgttgagagtaaggaatttagtacatatacctttcctttcactttcctaccctctacctacttaatgagttcgattatagtttttcagttcacccactgttaaataatatacctatatttataatatacctatataatatacctataataaacctatatttttgacttatcaactttggacatatctattggtgacttgtgatgagagatgaaataatttgtacatttacccttcttttccattcttttcccctacccattctcccctttttggctaaatgattgcttttaggttgataaggtttataatagctactgttctgtggttataaaatttgtttcatattttatgtgaaatttgattatacaactagcattcaaaacattattatgtaaatattagttactgtaatcacacagtgacgctcaaggaggtatttactaagcatacagatcattccttctggatccaactcagcagttgctttgctgtgccttacctcatctttcgtggattccttttcttttgattgcaatatatccttgagtaatttttcagaatcgatatgtactgtctgaactctcttatacccaaaaaatttgctttcacatttgctaatagtttgacagagtatcaaattctgctttcaaattctttccccttcatggctttgaagatactgccccactatatattctaaaatccattgctgctaatgagaaattctggtgtcactctgactcttatttctttcatatcacttggcattttcttccgagaaaatattacttatcttcagaatgatgaaccttctctatcatgtctctaggtgttagggcttctttcatttaatcctgtaggtcctcaataggctttttaattaaagtctcattttattcgggctctgtgaaattttttgttatgttttggcttctttttctcttttgttgtctctcttttctccttgaatgtctttctgatagatatagcattcccattatctatcatgtctttcagattatcctacatttttctctttgttttctttttctaccatgtttagaattctcttacacgtaagacatcacttactagatcttcagtcatatcctttttattattcagtctgtgcatttttaattttcaattttggcaaccacatttttaatttctaagaatctattttgctaatagtacttttgtcctgaaactttttatatcctgcaatatttagaaagagcacacccttatccacagctgattaggagtacactctgaatgcagggcacgatgggcgaacattttgttactggcctcctcaagcctcaatgcccagaagttattgcctccatcagaaacccttcttttgttctatccctcacttccaaatgaagttccagcttaatttttgctgtcactgtagtgggacaagcaaatccctatttcacgtgatcattgctcaaacctctattgacaatcctgctttgcattcccttatttagagtgggatggaaaataaaggctatgaagggggaagaatctgatcccaccattctcctttttcattgcagttttctccttttttatggatgcaataagctgttgcaatctctcaggatggaaaagaacattttaaaactactctactgccagaatgatctcttttttttaattatactgtaagttctgggatacatgtgcagaacatgcaggtttgttacataggtatatacgtgccatggtggtttgctgcacccaccaacccatcatttacattaggtatttctcctaaatgctatccttcgcctagcccctcaccccttgacaggtcccagtgtgtgatgtttccctccctgtgtccatgtgttctcattattcaactcccccttatgagtgagaacatgtggtgtttggttttctcttcctgagttagtttgctgagaatgatggtttccaacttcatccatgtccctgcaaaggacatgagctcatccttttttatagctgcatagtattccattgtgtatatgtgccacattttctttatccagtctgtcattgatgggcatttgggttggttccaagtctttgctattgtgaatagtgccacaataaacatacgtgttcatgtgtctttatagtagaatgatttataatcctttgggtatatacccagtaatgggattgctgggtcaaatggtatttctggttctagatccttgaagaatcaccacgctgtcttccacaatggttgactaatttacactcccaccaacagtgtaaaggcattcctatttctccacatcctctccagcatctgttgtttcctgactttttaatgattgccattctaactggcataagatggtatgtcgttctggttttgatttgcatttctctaatgatcagggatgatcagctttttttcatatgtttgttggcctcacaaatgtcttcttttgagaagtgtctgttcatatccttcgcccactttttgatggggttgtttttttttcttgtaaatttgtttaagtaccaaaaacagatacatagactgatggaacagaacagaggcctcagaaataacaccacacacctacaaccatctgatctttgacaaaccggacaaaaacaagaaatggggaaaggattccctatttaataaatggtgttgggaaaactgactagccatatgcagaaaactgaaactggaccccttccttacaccttacacaaaaattaactcaagatggattaaagacttaaatgtaagacctaaaaccataaaaaccctagaagaaaacctaggcagtacaattcaggacacaggcatgggcaaatacttcatgactaaaataccaaaaagcaatggcaacaaaagtcaaaattgacaaatgggatctaattaaactaaagagcttttgcacagcaaaagaaaccatcatcagggtgaacaggcaacctacagaatgggagaaaatttttgcaatctatccgtctgacaaatggctaatatccagaatgatctctattttattttttatgacatattaatcatgtttgttctcttgtgtcctctctttctttctctcgattttccagtggtccatggtggtctatttgtagggttcatatttacaaatgggagtcaaggtgactccactacagttatgtgaaaaagtttccctgccatgcctctccctacactgggcgagctgatctggttccgggtcagtggatggagcatttcctctcgcaggcacaccttcaggctggtgggagcaacttgggccatggactggaaccatgtcaatggagaagacttcctctgtgccaggtcctggtcagagctgccgtcttgatttatttgtatccctctttccgtctgtggtaaagatctggaggttcttaagctctctctggcctcaaaacccacagcaggaaatttcctcactcagatcacccacatttttagcaagcagagcttcagttttgagtggagggcaggagtattgggcagtagggaaggacacagttctctacgccgttctgaatgcagtgcattaataaactctcttcacagttgctccagggtgctttgcattggtgaacttctggcttccaggaagaacctggttacctctgatgtgttgggttgttgttccatctactctaaattctgtgccaatccatcccatctgtttcctaccattggtttatttttaaaaaatattttatatttatgtagatttatgaacttgattattataccatcattagagtttgggtccagagtcaaacttctataaacctgtaatcaaaaattggcctttattttcatgtagaaggaagtagcagaccaaaatggagttctatattccatttttctaaatgagccattgagatgtagagcaagcaagtgcccttttgagggaatgtgtgtgtgtgtgtgcacacatgcaagggcattttcccatgtctcccatcctttaattattccagtagacagtgggccagcagcaggtggtggcataacttctccatttgcagtgctgtggctgtggtgggatctgaacaggaggcaaccttggcaacagtaggaatagaatgtggagtcagcaggaagcgcttttccctcccacttacctgtcttcttgtagcagacagcagtgcgggcagcttcggctgacttgcttagcctgtttccattgtgagcataaacaccttagacgttttttcatttcaggacactggagcttgatgaaattaaactacactcattgtctcaggcaaatctcctaatcctattctgtgcttttgttgttgttgttgttgttgttagtggtgtgtttctctctccacttcgctttccttttaaaacacaacaaatttttttttttaattttaaatgaacttattcattgcctccctatgtgtcccctcctttctagtgatattgccgctgttcattcccagctgttcttgattcttgtacaagactctttgctgggcttctgccttctagacgcttcaccttcccgttatttcttccctctgcccccggaaaggcccttaccatggctctgatgatgatgacagctgacccttttccaaggtggaatccacgtttgattctctgatcttgtactggcttagcacagtgctcggcattcagtaaataaggttaaggaaggccagtgatatagagtagtagaaaacagcagttaatgaaggcttgctttctgtcacaggttcctctcctccaggactgcagcatctctgtctttctgtcgtagcatacaagacagcatctctgtctttctattgcaacttccaggtgagaagccctcccacaagcatatacaaattttatggaaacagacaaaaatttgtagggaagcaaatcccttcaaggttgagtctttctggtcttctagaaggtaagcttggtgatggggcagtcacagccctagtgcttatggaacttggccctttggggacagatctcagttaactaaagaaatgctatggcacagagtaccttgaatctcctctaatttatgctgtacagggaattattcacactttattgttaataacacattacatgggggaacaccagacagctgaccaggactcctgtgcttgaaagcttctgctcttcagcagggcagccagcctcttctcggtttagcacagagcttttattctcctcgctctctctaaactcctgttcaagacagtttccaattctgttgaattcactcatttacctcatctgtgcctttccccacctcattctctccccttcagagtgcccatttctgtgtttcaaatcccacaaggccaagcttagatgctattatgtctatgacattctccacctctatcccaataaaaacctttgatttcatcttgctgtttgtatctttactctgttatatttcacccataccagagttgtttgtggacatgcctgatttccttcaggctgtaggcatatttgattcatttttgtactccatgagtgcctaacatagcatcttatacaccatagataattaatagatgcctcttggctgcatttgtattaaatttttaccatgtacttgtcctagctagcagagacttggggggaaataatgatgactgatttttacttatttatttattttttattcccacaggtttttgaggaacaggtgatgtttggttacatgaataagttctttagtggtgatttctgagattttggtgcatccatcacacgagcggtgtacactgtatctagtttgtaatttttttatccctcactcctttccctccctttctcccgagtccccaaagtccattgtatcattcttatgcctttacatacccatagcttagctcccacttatgagtgagaatatatgatgtatggtttttcattcccgagttacttcactttgaatagtggtctccaattccatccagaaccctcaaaaccatgcaaaaccgtggaaacaaaatagcctgctcctgaatgatcattaagtcaacaatgaaatcaagagagaaatttaaaaattctttgagctgaatgataatagcgatacaacttaccaaaacctctgggatacagcaaaagcagtgtcaagaggaaagttcatagcattaaatacctacatcaaaaagtctgaaagagcacaaataggcaatctaaggtcacacctcagagaactagggaaacaagaacaaatcaaacccaaacccagcagaaggaaagaaataacgaagatcagagcagaactaaatgaaattgaaacaaacaacaacaataaaaaagataaatgaaacaaaaggctgtttttttgaaaagataaataaaatggatataacactagtgagattaaccaggaagagagaggatccaaataagctcaattagaaacgaaacaggagctattataatcaataccacagaaatacaaaagatattggaagctactatgaacatctttacacacataaactagaaaacttaaaggagatggataaattcctggaaatatacaaccctcctaggttaagccagaaagaattagaaactctaaacagaccaatagcaagcagcgagattgaaatgataataaaaaaaattgccaacaaaaaaagtccaggaccacacagattcacagctaaattgtatcagacattcaaagaaaaattgataccaatcctactgaaactattccacaagacagagaaagagggaatcctccctaaatcattttatgaagccagtatcaccctaataccaaaaccaggaaaggacataacaaaaaagaaaactacagcccaatatccctgataaatatagatgcaaaaatccttaacaaaatactagctaagtgaatccaacagcatatcagaaagataatcaactatgatcaggtgggtttcataccagggatgcagggatggtttaacattcacaagtcaataaatgtgatacaccacatgaatagaattaaaaacaaaaatcacatgagcatctcaatagatgcagaaaaagcatttgacaaaacctagcatccaattatgacaatttttaaatatggggaatggtcttcatggaaaagtagatgttaatggcacctgtattagggttctctagagggacagaactaataggatagatgtatatataaaggggagtttattaagaagtattgactcacacgatcacaaggttgggttccgcaataggccgtctgcaagctgaagagcaaggaagccagtccaagtcccaaaacctcaaaagcagggaagccaaaagtgcagccttcagtctgtggttgaaggtataagagtcccaaagctgaagaacttcacgtcagaaattcgagggcaggaagcatccagcatgggagaaagatgtaggccagaagactaaaccagtctagtctttccatgttcttctgcctgcttttattctggccatgctggcagctgattagatggtgcccacccagattgagggcgggtctgcctttcccagctcactgactcaaatgttaatctcctttggcaacatcctcacagatacacccaggagcaatactttgcatccttcaatccaatcaagttgacattacatattaatcatcacagcaaccaaaagattatctcatttaatccttacaatagctctgtgtagtgggtatatattttccttttgctgaagaggaagtaggcttagaggggttgagtaatttgcccagaatacctaggtagtagaagatagtagagccattatattctgtctgcattcaagagtgtgctgctttatttgttcctgaattgcacacaagctaaagaatacaactggatgttcagtctactcctattttgataacttggctaactttactgcagagtctgcagaggtgaccaattttactctgggagataccagggaatccgccatgtaattcctcaggctgagtgttttggaaacacaaagctgtcactgctattaagtgatgttttttcctgagagtctactatgctcccagtaccagcctccgcaggccctctgtctaccccttttctgtcctgatgtgttctagcaggcactgagaaagtcattgtagaagttaccatgactttccaaatgcttccagaagcagaacacaatttcacaggagggccaataagtatgaatgccaccttgatagaaagtgaagttttgcgtcctgttgaacactcagtaaatgcttcctgaatagatgcaggattggcaaaacatagctccccagctttcataattcagactcagaggcccttcgtgctcctgttattcttgttacttcatgtcaggtacctaaaagggttgtttttcagttttcgtcattgatttaaagcagaggttagtaaactttttctgtaaaggccaggtagttagtattttagcctttgtgagtatttggtctcacaaaagcagccatagatgatatgtaaatgaatgtgcatggctgtgttctgataaaactttatttaaaaatgaggggtcatctgggctgtggtttttcaacccctgatttaaaacaaaaacaaaatgtgctatgcctgttagatgctactacatttgattctgtgttttccatatttttctaaaatgtactgaacaggaaatgaacaaactgatgacacaatgatctaatttaatcattgagataagagtggcgccaactcttattgagtatttgttatgtgtcaggcacttggctaagcactttacatgttttctatgatttataaagcaaatattgttattatcttcattttttgctgagggaaggaataaagtcacagccagcttacagaggctgccggaggtcacacatcaccagtacactgaaacacgtggtctgattacaggatccatgatctcctgtacagatcatagtgatattgacctgagaggaaagagcctaggacttacaatcagaaatctgggttcacatttcaactccgttccatgccaaattacattaaaactgggcctcagctttcccacctgtgaaagaggaataatactaggacttgccctcccaaccttagagattgctgtgaggataaaagcctatatgaatgtgctttataaactataaacaccatacaaatgtttgttataagtctgccatttgaatacatcttagtctttttttcctatgtgaaataaaacattttaagacaagcaatgaaattcttgaaactataacaggtttttaagggtgttgatccccaaagccgtcttcactattttgctccctctctgactcgctctgtctctgcctagcagcgctagtcttttctacgtgtttgatctgttgttcctgtgtttaggcccatccctactacacagcggaagtcagctattttttctctttcctttgctctgctgagcaagattaaactcttttcacctggacttttcctagattactcaggctgggtggaaatggggtagctgtgaggctgggatgttactgtacaattcaaatttatgatctgaacttaactagatcttgctgaagattgacctggctagcacagttttgaggcacctatctttcagtcccttctgtcctcttggcctggccactggccacatgttagtagcttacttctaaggatggaatgccatgcatctcctacaaggttgtctctatgcttcacacaaagtaaaagaatggaggcaactttgaatgctgctcattttcactcaggcaatccctttacaatattgtgcttagtaaactccccccactctttttttcccttagcttgttttttttttctaataaaagtctatatcaatttgatgtattagttagggttctctggagaaacagaaccagtaggatcaattgattggtcaatcaatcaatcaagacaaaaagagattcatctggaaggagttgattcatgccattgcggtcattggctagtctgaaatctgtaaggcaggctggctgactggaagctcaggcgggatttctctgctgcagtctcaaggcagaattccgtcctcttggggaaacctcagtctttgctcttaaagctttcaattgattggatgaggcctacacacattatggagaataatctgttttacttaaagtctactgattgtaaacattaattatatttaaaaagtactttcacagcaacatttagactagtgtttgaccaacaactgggcaccacggtcaagccaagttggcatatagaattagccagcaaacttggtattcacaatctgtcattatagtcttatctataaacctaaggtttagagaaacgctggtcattctgaacaattccctgtgaatgcagagatcaaggagcctccccttaactgggtaggcagtgtgaaatacctgcagtgtacttgaccttactgttcacccactggcagctgttcctacagcttggcttcagatatataatattacattggctaacttcaaagagcattgttttccaaggatagagatggtgatggtgtatattacttttaccagccccagacctgtaagaggttctcatctcttttgtttaagattttgttgtttttttttaatgctcaataaaagaagctttattctttcattaaaaaacaaatctcagaagaacagggaagaagagggtagcctatgaaagtgtgattgttatttgataccatcgtgacttagcttgttttcacctaagactctgagattctattctgtttatgtgagatttgggctgagttcaactactatccatattaactgaatcataaaacaattaatccatcatctggttacattttggtggggagggagcatttaacacaacactaagccacatatttcactattttttttttttgcagcaaattgacttaactgcttgctttcacaccatgcctataaaacctttttggttttagaggttctatgtgtctggaaagtacagtgaagtatctcatcagaatagtattaatatttcttatgacatttcatatgtcctgatatgggttaatggagaaatatcataagagtagtaattctcttgctgttattatttgtcctatttagacaaacagaacatagaattaataagaattcaaaaactttaatcactgatagagattaaatgatgtttatattagtcatcatcacctaatatcttaaatatttaaccttttatgcagtgtttgcctctctacttgggtatgcccttaacagtaaaaagtgttgataatgctctcccttttggcactcacagaattgctatacatatatatgtataaaatatatgtaaatataaaaatacatagttaaaaaaataaatctaccactaaatatagtaagggagttttaaactgaggtttttgaagtctttaagaatttatttagagacttcttttgttggaagtatggtggctagatgccatgaaaaacccactgaaaacaagtgtaagtgctaggtaatatgttgaaacatatcttttgaaatgtattactgagctggcaagaaagtatgccattgtagagagtgaaaataagtgaaggcagaatcctgggaggtaagccagcctgaagatattgatgacactggatggccttaagtttccattttgactggcatgtaatccagccaaagattcccacagaaatccgaggttccaaatggtaaatccgtggtgacattggggtgaccgagaaatgaactctgtgcagaaaggaatggtaacaacacttgtctcgtacaactttggctctgggtaggggaaaggaaaacagcttcctagagaaatgttaaccacaagctagccctcatgagagatttcagctaggatggatgctatctgtgtagtgcaaaaaaaaaaaaaaaaaatccatagccagattttgtgctttaatgtggacctaggtcaatagtgactgcaaagccagaagcagtggctcacccctgtaatcccagcactttgggaggccgaaggaggtggatcgcttgaggtcaggagttcgagaccagcctggccaacatggtgaaaccctatatctactaaaaatacaaaaatgagcctagagtggtggtgggtgcctgtattcccagctacttgggaggctgaggcacaagaattgcttgaacccaggaggcggaggttgcagtgagccaaaatcgcaccactgcattctagcctgggcaacagagtgagacaccatctcaaaaataataataataaaaaaaagtgactgcaggggactgggaagaggaaacacaaatctttactggggaatggaatttcaagtgtatgcaccaacccttagaaatcacaaaacatctgacccttctgaaaataaccaccatgagtgagacagcaggaaaaaaaaaaagaaaaaaaaaaaaaaaacaaggaaagagagggacaatagaatcagactcatacctacaaaacttaaaaattaaataaaatgaatcagactcagaggcttcagagtttgatttaaatacattatacaaaagttctgtgtgaaatatgtttaagatgtagaagggtgcttgaaatgcacaaagtcaacagctgaaaaattgaccaagcagatatgaaaataaaatccaatagagggcatctggaaataaaaaagtataataattatagtgaaaaaagttattagatgggttaattagtagaatggatatagcagaagaaagatttagtcaactgaaaaatatatccaaagaataggtccagaattaagcttagggagataaagagatggtcaatacgaacattaggagacatggagaacagtgtacgaaggtgtaataaattctaactggagttaaagaggagatagtaaagaggaagaaaaaacacaaaactcaaaaaatgtagtggctgagaatcttccagaagtattgaaagacaccaatccacagattcagaaacctacaatttgcaagaaaaagtaaaaagaatttcacaccaagatccatcttcatggactggcagagcataagagatgaagagcttatcttgaaaatgcagccagagagaaaaggtctatcgcagttaaaggaagaggcaagcagatgactgagttctcaatgccaactgaaaatgagaagccagtggcacaccttcaatatgttgggagaatataattttcaacttaaaatagtgtacattgtaaaattacatttcaaaaaaagagggtagtataatgacattatcaaataaaaaccatcccttataacaaatatcactaaagaaactgttggaggatgtagtttaggtttctagaaaggatgtctgatatgcaagaaagaatggtaagtcaaatattgagaaatatgtgaggaaatagaaacaagaataactaatgaatcaatgatactgtctaatttgaaggttaaatgattaggtagaactaaaatatgaaacaataatagtatgtaagtcgggaggaggaggatgaagcttgaagtgctctatgcatcttgcatctctggtgtctttcttgtgtccaaactttttcttctttcaaggacaccagttagactagattagggtccacctaatgacctcattttaacttatttgcctctttaaaggttctatctccaaatacggtcccattttgaggcactaggggttagggtttcaacgtataaattttggggggacacattccagccgatagcaattataaatacaacttttatagtaaaagcccatcttctagaacaggtagagaacaaggttacttattttttttaagaacaaaattggtttaaattatcctaaaatgattttaggagaaaatggacattaaatatacaacatttcctcctttattattttattgatgacttgatatgttttttaaaactcagtaaaataaatgattagtctcataatcataagagagttatgcccttattttaatgccataaaactgtgacttctgaagaaatacaatcatataaaatcatattttaatttacttttgagaatgtacagtaactcaggaaggcagagtgtggaacctgctttaatgaatagataagaatgactagcaattaaaaattaattatctataattcttctgaagttcttgaaaataatctcttctaacctgggtaaatattcctccttttcagaaatgtttgcaatgttgcttttttttaaattaatctctttttcttagataatggaacataaatcttaggcacatttgctttgtaaataccaaattgcacacagattaaaatttaatgagcttttactgctgtaatctcaacaagcagagtctttgctgttggtttttcaataagaaatactttattttgttatacagtggtcattaagaaccttaaagataatcaggacagattttccaaattgcataatgctattgcctagctatttgcatgtattttttttaaatgacaagacatttcgttaaatatttacttgcctgacgttgaaagatttagacaaacaatgtacttctagttgtcactttttcaaaaagattcttagggaaaagttagccgttttgttggttggtaagtgatgggttttcttggaacgtgttgcttgctaattttaccagagaagaaaataaattcaaatggtaagctacattccaatttgtattcttcttctaaagtcctccctgtttgcattctcggattttgacactcctacacaccagttaaagcacttgttagagtgtccaaaaaattgttgcaattaatttcccagtctcttctctctttgatgtgtcactataatgctttgagtaattttcagtgtctggcatctgttcaaggacaatttctggattttaggagggggagaagcaataaaggaaacaacatatgttttttcctaaataggaggcattttttgtttgtttgtttgaacaaaaatcaaaaactttcttttctatataggtgacaaaaagatacacgactcattggttgttaactaccattgcattcttttctctttggagtagcccttaaggaccagattagaccagccatctgcatcatgtagcatgtctgggttacctttcccaaaagaagttcagatagatgaactttgcaaaccagagccatctgaagtttgttttttctttttgagacagagtctcattctgttgcccaggctggagtgctgtggtgcaatctcagctcaatgcaacctccgcctcccgggttcaagcgattctcctgcctcaacctcccaagcagctgggactacaggcacgtgccaccacgtccagctaatttttgtatttttagtagagacagggtttcagcatattggccaggctggtctcaaactcctgaccttgtggtccacccgttttggcctctcaaagtgctgggattataggcataagccaccacgcccagtccatctgaagttttaaaatggctgcaggtatcttagtaggagactaattttattttccaatgattagaaaaaaatgaccagaccaagaactctagggttatgtttcatctcatatcctgtgcaggatgttctgagaagtttctatttgtatctgtggagtggttctagtcttgttcatcttgcattttaaggtttggaggtattttatcttgccttgcttctttaccaccttgctttaatttccccctatattgccatttctaaagtaatgactcattttcaagggtgggtctgaaaggaaagaaataataaaaccagagatctggagaagtttctcgttcatggtcttattcactttttaataagagcatctagaacagtgagtggtgccccagcagatatctggaaatttttgtggaattgaattgaatttgttcttagagtaaatgacaataaagaaaatagtattatggaaactttcgacccaagggaaatatcaaggctaaagttgctatattatttttcttctgatggatgctgagtttttctccttaaaaaacaaatccacatttaaacataaggcattgtttgatggcctatcacattcagtagaatggatttgagaaatacgtgtaggatgcctattaaaaactctgttttgaaattaaacctaagactataagattgtctgtttaaaaaaattattgctgctgtaatttgagcaaatctgaactatattgaactttagaaattcaaatgtatgcaatcttgtaatataacttactccatcggtagacatagttctttgtcccacctggcttccagcagtttgtctgtctgtcattaggctaaactcttcatgttcctaaacatgttttcctcaaaaggggacatatttcttgggtcagatgtaaacatcaagctaaggagttctgctgtgcgtctagacaaataaggttcattttcatcctctacatagtgttaaacttgaatttaagatcacacagattcctttacacgttaccaatgtaatgatatagacaatctcactttattcattcactctgtttaattcattcaataaaaacgtatacattggctgcctactgtgtgccagttggtgaagatataaagatgattaaggcaagggtctgtgctgacatgcctaatgggcaggctgacacacctaaacgccagggaaaaagagggatgagacctgggcctctgaagccctggccacctggctcgaagctcactttaatgtgcttctgggtgtattccatgactttttaaaggcgcttatgtttcctttctggtaaagcatgtttaacatgcaaaatgcttatttcattgagtagcttttaaaaagtgttcatagaatgtctagaacagtgcttgtctaatagaagtataattcaggtcacgtaggtaatattaaattttctagtagccacattaaaaagtaaaaagcaacaggcaaagttaatatttttttttttcctgagatggagtcttgctttgtcacccaggctggaatgcagtggtgtgatctcggctcactgcaagctccgcctcccgggttcaagccagtctcctgcctcagcctcctgagtagctgggactataggcgcccgccaccacacctggctaattttttgtatttttagtagagacggggtttcaccgtgttatccaggatggtcgttaattttaataatatattcattaattttaataatatattcatttagtcctatataaaaaaattagcatttcaacatgtaatcaatagaatatattattagtcaactattttgcattctttgttttgtaccatctttgaatttcaatttgtattttatacttacagtgcatctcaattttaatgctaaatgtcatcggagatattcgatctctgtttagctttaatatatttttgggttgaaaaagtaaattcacataaccaagttcttccaaatatacttgaaagtgtttctgataactgagttatcaacttaaaaatgtaagttaatgacaataaatgaaagaaaaattctgttccttagctgcactgaccacattttagtgttcaatagtcgcaggtggccagtggctatcatattggatagtacagctttagaatgacagttcagtgcaacaagtgctataatagactcatgaactggaagctccgggaagttaagaatgggatcaatgaagtgggtcttgaaaaaccaataaaaattcaccacgtagagaggaggagggcgactactccaattcaatcttttgaaagcatgtgaaggagcaacagtagacttctttaattatttaatagtaatttattgaacatgaattatgggaggtgcatggtgtgggtgctggtgagacatagttcctgagctcaagtagcttggtgtctaaatattcatgggcccatttttcagaaaggatggatatatgtgtgatcctgggtgtgccaaatgctgtggcttcctgaagcttagatttccagcttgtcaccttcaaggttaccttgtgaataggacttttttgagctgtaagtaaatttactttgcctatttatttccaatggaaaaaaagcttttttaaaaaataaatctcatcttattgcctatgattggccaagacaacatggcccatacagaaggtttttgatggcttctgaggtctgttatcatttgcttattggcatttcagctgtcaaccagggttctgtcaaattccattcctgcctttagctcttttacttgaatacctggggcaatggcagaagtggttgctatttgtcacctttccaggatgttagtcgtgtccttgagacaaatagaaaatttaaagtcagatgacttgattcctctgccagttaagacccttagagagtcctcagaatgttgcttatttttaaatttcaagtccctggtaaggatcaagtaaactccccaatttgcagatttctatccagttgactatggattttgcctgttgctttgtttccaccaactctccctgaagatgaggcgcacagacagacaactcacaggcaagaacagcctggtccatcttgaaagattctcaagactattctccacaagataattgtctacttttaaaaatattcagtaaagggaatttttgctgttatccttggttgtgtttttagtatctcatcatccttctagttgtaggaggcttttcctaacatctaacccatatgtctgttgtctcatcaggtgtttctattaaggctacttccccatcaatcttaattttttttttaatcttctgagatgtataggttaagttgaaatcagagactttcataaaatggtaagatggccatttaaacgcaactatgaggaaataatgtaagcaggattccattggagaaccaaacactagcaacaactaacttggtaatcaatgttgggacttgaagttaggctaaaatcaatagtaatggcactcgtatgtacaaatgcagaactttttacacacaatgatttttccctctgttattatacactagctgtgtctgagtagacagtccagctccactacctgcagtccaccctgggctgtgtaatctgagcactgatgggctgttatttgtacgtattacttctatgacactgttttttcatctgtgttagaaatgtctttctttcttgaataagctgcttcaatttcttatagacagattctgcttttatgacccttgtttctacaaagtaatctctactcatgctgaaatctcagacaattttaacaaatatttagagtacttaatttttctttgaattctaaatattatccttctttagttcaccatagttggatattttgagataactgtggaggaaacagcactgatcctggggccatgaaacctgatttcaagatctagtcccttctttaattttgcacaactaatttaatcacattcatccttaatttcatcatcattaaaatagcagagaataattcccgtttcatggagttgatatgcaatgaaatagcatatcaatgtatgtatgaatgtcccccaacatagagtactacacaaatgaaacgtgtcactcagcataacgttatgtgctccttcctgcaactggattgcactccagtgggatttcatgctggtgagatggctgtgctgctggacttcatgggacaccaatctttgaaaataagcctgatctggctgggcgtggtggcttatgcctgtaatcccagcactgtgggaggctgagacgggcggatcacctgaagtcaggagtttgagaccagcctggccaacatggtgaaatcctatctctactaaaaatacaaaaaaattagctgggcatggtggcatgtgcctgtaatcccagctacttgggaggctgaggcaggagaatcacttgaacccaggagatgaagactgtagtgagccgagattgcgccactgcactctagctggggcaacagagtgagactctgtctcaaaaaaaaaaaaaaaaaaaaaaaaaacacaaacaaaaaaaaaaaagaaaaagaaaataaacctgatctatagatgaggccagtggatcttgtgaagagttgaaaggtcaggtatcagtcttataccatgtcggatggggcaatcgtcataactttttaaaaaattatttatttattttgagacagtgtctcacgctgtcccccaggctggagtgcagtggcatgttttcggctcactgcaacctccgcctcctgcgttcaagcgattctcatgcctcggcctccctagtaactggattacaggtgtgtgccaccatccctggctaattttttgtatttttagtatagacagggtttcaccacgttggcccaggctggtctcgaactcctgacctcaggtgatccacctgcctcagcctcccaaagtgctgggattacaggtgtgagccaccgtgcctgccccaattgttacagctttttaagtggattatatgcctgcttcaggcattagacataataagttaatctgttgataagtttcttcatttcttaattttcagttgtgttttgatgtgtgtggtctgggtgagcggctcagtgctgctgctgtggagaaggcgtgatatggaagggatgtgactgtccttcttcatcttcataacggggccaggactggggtgaggtgtgtgagatgaatgaagcactggttttgatacaaaatttaagaaaaatcaaattcaagaggtaatattttaatacgatatttgtaaaaaatcaaaattagtgcaaaaatttgtgatgagcaaaatgttagataaaggcattgttgcttttctttttctgtgtattgtaacacaccatcacttagtggagaaacagctctcactttcctcctccccagatacaaccatttatgttgaattaaacttctagttctcctatacctgtgagcatcccccaggccccttggtatggagaaagcagtttatttgtcttagtaagattataaaagtggcaataaaatgtgaatgtaatgaacaaaatgcacattttgtggaccaacttgttgttttagatctatttttgaaaactcattaggtatgtgcatgaggcaaaataattcaagtgcagttggatattaaatgaaaaagtgtcaggtccccttttctgccatattctcttctgtgtcttcattagtggaaaccattttgaccagttcttataattctaatgatttgctgatggctctaattcttggtttatcaacttcaagcagaatgtcttgacatcttggtatgaaagttaaagaatatgaatcatttgttctctcccttctcctttcctctttctctgcctctcagtttttgttgtatgctcacggagtatgtgtgtgagcatgtgtgtgtgtgtgtgtgcacgcgagcacgtgtgtgtgtgtgcgcgcccatgggtccatttttgcatggcaggctttgttttagaaagattggttacaacagctgccccaccaatctcctctacagggaaggattcctactctgagaccttggtcttttccaggcagatcacttacatttcctcacagattatttctcatcctgcagcctgggtccaaatgggctttgctgtgaacagtgactctcaggcttctggtctctgctgtgcttgagtgtcgttgagatgctccatctcctcctactgcacccacccagcaatcatctctctttcaggaattcaccaaagtcttttttaaaattattcttttgttttgagacagagtcttgctctgttgcccaggctggagtacagtggcgcaatctccgctcgctgcaacctctgcctcctgggttcaagtgattctcctgcctcagcctcctgactggcagggactacaggcatgtgtcaccacacccagctaatttttgtatttttagtagagatggtgtttcaccatattggccaggctggtctcaaactcctgacctcaggtgatctgccggggtccattttacgtggcagactttattttagaaagataggttacgacagttgctccacccatcccccctgcagggaaggagtcctactctgagaccttggtcttttccaggcagatcacttacctttcctcacagattatttctcatcctgcagcctgggtccaaagtgctgggattacaagcgtaagccaccacatccggctcaccaaagtctttgggtggttgatgtcatatgcctccagttgatagcacttttaagaatttttcctttttgtatgctgttattatttttagaaggcttttggattattattgttaaagagtatgccatgtctatcttttaacttttaagcatctattgctttgttacttgtactttatatatatgtatatccttcccccaataagacaaagagtgcaaataatcacctcccttgcctgttgtttgggtttaattcaggagtcagtggaattaaaagcctaaactcagtatagttttaaagcagcagtccccaacccttttggcaccagggactggctttgtggaagacagtttttccatggaccagtgtgggggctggaaggtgattccaggatgattcaggtacattacattaattgtgcactttatttctattattattacattgcaatacataaggaagtaattatacaacttaccataacatagaatcaatgggagccttgagcttcttttcctgcaactagacggtcccatctgggggtgatgggagacagtgacagattatcaggcattagattatcataaggagtgcacaacctagatcccttgtgtgcacagttcacagtaggattcgtgctcctatgagaatctaatgctgccactgatctgacaggaggtggagctcaggcagtaatgcgagcaatgggagtggctgtaaatacagatgaagcttcacttgcacgttcactgctcacctcctgttgggcggcccagttcctaaccagggttggggacccctgctttaaagaatatgtttgtggattcatagagggaaacaacacacactggggcctttcggagggtggagggtgggaggaggcagatgatcagaaaaaatattaataactaatgtgtactaggcttaatatctgggtgttgaaataatctatacaacaaacccccatgacacaagtttacctatgtgagaaacctgcacgtgtactccagagcttaaaataaatgttaaaaaattccctccaaaaaggatatatttgcatcggagttatatttgtatatgagtatatatttgtatatataaatatacttgtatatgaaaaaaatatcttttttctttcattttattttccaaacattaaagtcgggcacattggttaggaatttcaccaatactttttacaaaactgaggacttggatgataaaggcactttttaaaagattacacactggcatggggaataatacctttataaagatgatctatgtgttcctgaatatcccgatgcatctcctagctggatcttccgctccacaaaaattcataagatgagattcttgaattagaatgcatgccttaatgtattaagtctatgtagagagagttatttagtccatgtaaattaagtgggaatatttttatttgattactgttttatctggatcttgcccacttaaggccttcaaaaatgaaatttaaggcctgttaagcagacccaacatcaacagcatattctctctctcttgtaagtattgtctagttgataaaaaatttcaaaaacatgtcttaatcaaaaacaagatgatccagcacaggtttaataaatgttttgtgaatatggcacattcgtgtctcattactacagttttcctatgctgtctttctcaataattccccccaaaattgtagtgtttacattatggcatttatagttacctctgaacctaaaaaattaacttcaaaagtatttaaaaaaatcattatatttaaaaccatttcatgtttaaatggtttgtacagggcaatgaaaggaaatgtagtaataaacacagaatcagatttggtcactaatatttttctgcagttgaaatatatgtagactggcttagggtctaaatagcattgaatcctgttaccttccatctataatcaattaatgtattatgacattgttgtcctcagatcactgggatctcatggtaagtaagtaaagggattattctgtgcattttcccaatatctatattagttttaatatacctttatgttaatgtatgacactgacacttagtaattggattaacttcctatcagaatttgtttttcactcatactttgtatacatgtcttaagggtagggtagatgtacatttttttctgtgttagcctatctgtttctgtgacactacatgctttctgtcctccaatttgtgtttctttccgtgtacaaatatgcatcatctaccatctacatctacaaaacatgtaggcttccaatgttttcatgtaaatacatttcatgagtcctcagtagagtgttagatgagtggttaattagtaatgttaataaatgtaaattacaataaaaacatttataatgttaataaatataagtttattgaacttaaataatttaaacatcttctgaaatgtagtagaaattatgattagccataactagtacagtattttttgcttgtttaatttttttggtgatattccatttgtggaatgagtgtgtgtgtgtgtgtgcagtacagacagaaaggagagaaacatatctgcatgttatgttagaaagagtagtgttagctaccctaccaaatttacatactggctgaacacagtatgtaaaaaattatttttttagtccattgctggtgttccttgttgttgggtgactctattccacatggtgatgcagggaaccaatctccttccttctgtggctgtgtaatcccttgcaaccttgaagtcctctgcatctaactttaggatgaggaaagtgaaggtggaggatatagccctcttgactgccttgacctggacctggaacatctcttttgctcccattccatggggaagaactagtgacatggtggcccatagctgcagaggggaggctgagaaatgcagcctctggataagaagcctactcccagtggttactgtacattgtgggagggaagcttgaattctgatggacagtgagaaccattctccacacaataacgaaatgacgtcttctcaaccttggcaatgtagcatcctgtgacttaagtatgtaaataattatcagtacaggtcagtgaaaaattaggtcacctttcccttccacttttaattctatagtttaatttgcctatctgctacatattatatatatgggaatagataagattatctataaacatgtataaatttgtttcctacactaaaaagaaaaatgacaaagaagaattaagttagttgcccaaatccacacaataccaccaggagaaagtctaggaaccataccttctaaatccaggtctacacttctttagtgcactaaattttttcctaatatagctctgaggagactggtgtttaagaggagaatgttaagccaaaagcccatttcacttggctctgtacagacagtaagttaatttccaggatgtataactcctgattttctgtgatgacagagaaaatactgacctgatttgggtaactctgaggtttggagatcttgaatagcctcatgttcctgaacttctttaccatacatgaattacttcttaggaagaaacatttattctgtagaatttggtttcgcattttatttttattttcttagacactggtagttggaaattcaggaagaatttgactacaaaaaacatttattaaaaagagtttctaatctcacctgctaagtgctacaaggaaaaaaaaaaatacattttgagccctcaaggggctccaaatacggttgaaggaaaattagacccagaatagtatatgattaggaacaaaacgatggcagagaaatgagagtttagagaaaggagagataatcctgagttaccttaggaagagaaaatttcacagagaaaacggcccccacactgatttggggaagatgattcagacttgtctcaatggcatgaggagcaggggccagatgggaaaggacatcgtggtggaaatgacacgatgagcagaagcttagaagtacttctgcttcacgtctgtgattctgcctctccccttgtttctgcagtgctaagttgagtgtagttccccacacaaaccctgagctttcttcccctccaggctgctccatcagtcagacaggagtgccttctcaggggatcctcttcctcatcttatcgggccactcatctcgtcgcagacattcccatactcctggttgacttgctcttccctctttttaactgacatgagcaggcatcacctcttccaggaaacttccctgacaccaggctgagtctctctggtgtcggggaaggcttctgtattactgcatctgccattttgatttaaggttttctgctcattccaactcaacagtgagctctttgagggcagaaattgtgtcttattcatttttcttgttatgccctaaaaatgtattgtgataatatataagtaacgtacaatttaccattttcacctcttgaagtgtatagctcagtggcgttaagtgcattcacactgttgtgcaaccattatcaccattcatctccagaactttctcatcatcccaggcaaactctgtatccattacacaatagctctccatttcctcctgccctcagcctcaggaaacctcccatctactttctctttctacgcgtttaactactcatatagatggaatcatccaacatttttccttttgtgcctggcttatttcacttgacataatgttttcaaggttcttttatgttttcttatgcgtttttatatctctctatctttgatagcacccaatacatagaagacaatgaatgtttttgtgagtgaaaacataagaccagaaagaaataggatgtcatattctagggacactcaagacactttcttgaggacagaggcactgtagcttggaatttggaagatgaggttggcaaggtgggtggggaaaggatggaaaagtgatacgtttcttgaagcatgtggatttgcttccataagcagtggtggaccagtgggcacccttatctattaaaagaatgattttttttgtgactcgtgtagagcactgtcttagttacctaccccagtggtagataagagaagcggattaaaaagagatctgaacctgaggaaatggagactaccaagttttttgtaaatatgtctgttataacatatattatctagtacttgcgatgcctgtgccaaagcatgctttttggtttagttaagcctacttagctcgctaatttcagtaattttggcttgaattgcaaaaagttgatgggggagatgggggagtctctgacatccttcccccactcacaggtttgaaaaataaaattatgaagagcaaaaggatctttttctgtggtaaattgtacttcatgacaataaacgagttgtggttttagtggttaatttataaattaggccatctggttcttctgtaatctaaagatttttatatatatgtaaaatacaaagttgtcctgggcaactgccaatctataaaggagaaaacatcttgaactctgtggagataataaaaccatattcagctgccaaagtgctgctgacatactgtccaatgagacacccaacgcctttgcattacagccagcaaggtgtggagctagatgtattgatctatttaataatattagcttctcttctctgggtcggacttggcccagagcaagtgaacaggacctatctatctccttctcaaaagtcacagctttcttaccaaattgtacaactcaagccacaaagaaaacaagtcaaggaaaggaccagaggagcacgagggcacatgccttgttcccagaccctgggaccagctccagctctggctccttgcagatcccgctcttctcaagttctctggctttgatcctagttttctgccctactattcctgacatgtacagcacttagcaattcataacttgctttattaaccaatatctcaacagaacttttaaacaacctgggaggaagcagagtgggtgttactgtcctcattgcacagataatgaaactgaggttcagaaaggttgagtgtcttgcccaaggccacacggcttcttagtggagaagccaggatctgcaccaatgtcttccattggacacactgccacttaatatggtacttagtttttctttctagatgaagcagtatgaggaattctaccatggatatctctctctatttttttaaactgcaaaataatgataatgataataatgaatacttctagaatacagtctctatgccaggcactatatgctttatatgtactaacttgcttaattctcctaacaaccctagaaggtagttactaatattatcactatttttaaatggggaaactgagttacagagatggtaaataagttgcccaaggtcacagaggcagccagattagtgacaaaagtttgagagtactcagtttgaattttacatgttccgtggatatggtttatgccaaataccttctcctttctagacctcagtttcctcatgtatcaaacaagtggactgcactatacaactctgaggtcccttctagcctgaagattagagtcttttatgcccacatgatatggaaaacattaatgctggctctttaagactggaaccttgtcatttaaaaaaataagctctactaaatttgcagtaaactgtccaaatacgatctctggtctctgatttgtatctctcacagagcatgatacaatgctagacacatatatactcattaaaaacttgctgaattaaattgtaaaacattcctccagatagaccgtaagggtgagctgatgccctaatatgctcctcagctgctgacttaggacccgtgggtgacaaaccctgtccttgttgttccatctgtgacagtgggcagtgtccaaaatgagtctcttcatcaaaagtgagtccaggaaactggatcagagtaagtaaggagtcttccttgcttctttttctctaaaatacaatacagtgcattctagcaaactaccagcatgcctataaatctcattttaaaaatatcaggaaatagatgctcattgataaagagggtaagaatgagcaagggagagagtcaagcctgtacatttgtgcttagggtattttcatttgagaaattatcattggaaagatcaatttccaaggcaggcgttttgtcttgacttaataaactaatctttatcaataataattaaataatgtcattttcccagatacaaaggggaaaccataatgcctttcatatgccttctcatatcttcagtgtttctcaaacccagctgtggggtctttttagggaagatacaaggagggtgagaccatgtggagcacacactcagcagccactgtgaagtcatgggtcccttgctacctttggaagctgacaatctgcatgaaaagcagcccctaggaacatgggtagtggcccgggatccaaaactcctgaatccataaaagggcttttgacttcttgttccaggacaagtgacatctgacatgcttgcctgcttgtttgcctttcttccttctcctatccgtctttccatccatctgtccatcagtctatctgtccatccagtcatccatccatccttccatccattcgtctattcatccatccgtccttccatccatccatccaagatttattgagcacttacatgacaggaagtatgagacacaaaagaaaattctacacaattctcctagggacatgaactaatggttagcaaaaatatatgggaagtcctgcttcaagtaaaattatgacttaagatatacatcagatatttgaaaaagatatttttaagttcaacattgaaattctaactacattgtgtccttaatttctattttctagttagacttttttgaagatacaaatcatttgaattatcattattattgttacttgattttatttattccacatgaatggtaagaattttaaaggaaggtgggtgccctaaaaatacatttatgccaactggattgaatcaccttgaatcacaatgagtacaacaactgctaatgagctaacacttaatgagtaatgaccaggcaccagacactgttctagcactttatacttactgatttctttactcttcatgataaccctatgaggaaagtgcttttttgttaagctccattttcagctgaagaagctgaggcctggagaagttacatagctttctcatggtgtctccactatgaagtagctgagctgagatctcacccaaggccctgctgggttcaggccacactcttaagtactcacagctgcatcacactgaatatcatctccctgcactgccatttcatttgagcagggctttgcctgtcaagaacattcatatcttttgataaacagtgcattttttccctgatagtctgtatgggacagcctccttgtttgcatctgaaggacagggacttcaggacctcctgctgtggtcaccaaggaatcacattcaaacttctcagcaaggtgttatggtccttctcagtttgcctacgatccattgaggcaaaggtttccttctctcaatacaccctctgctttagccagggggacctcccactgtcctctctatgtgttctatttgttcctgactgttagtacccgcttgtgtggtttccatgatccttcttctgcctggaatgaggctcctcttgagtcctgagagcttcatttctgtctgtcttttgggctgtgccaaagcccctctgccttcgtggactccccactgattcattaccaattttcctctcctctgggctcttcttagattgcaaatggtgcctctggattgggtaccaagacttgcagtgccttattttgataccactaatatgagaccatgttatatgcctcttgagatatcattccctttctagcaatagacagtgataagcatgcgtatagagggtaaacgtaggactttgaggttcatccatctcaatagacaaaagtaaaagtatgctaatttcaatccttcacacagtaaattgaatgtaataggtcttcagtaactatttgaggaatgaaattgttattgatatattgatttaactgagcaaatccataagtgccacgcttggagtaaagtacagggaatctcattttttgggtaatttcaaacaagtaggagaccatccactatctattaaggacaaaggagatttgagtgacaaacatgttccagaccatccaatggtgttattctactacttcatcccagctagtaaaatggggcaataagaaccaaaaagcaggtactgtccctatgtaagtagacttcctagtcctggccaaaacaaaaacaaaaaaaaaacaaagcaacacaaaacaaaaacaatgtgtgaagagcatcttaccgttcattgctttggatgatttgtgcaaatctagttaatgggggtggatctgatcagtctttgtaggaagtcagtattggcatatgtctggcttctgaattttctaaaaatataattatttatttttaaatccattcaatcaacactgaatttactaatcaactactaaataagtaaaagatcctatagtagatccttcaagaaatggaaattgagacattaggtcactataaaccccaacccttgtaatctttttgtggcaaccttaggaaacttggaatgctttttacactctgataaaggtttaattgtaatcatagccccagtgttgcaaaatgagtcagaagatacaaagtatctcataggataatattatagctgtaggtacttcaaatggacaagtataacacattatgactgctaatatggatgcattgggaggaaaataagccctaagaagcaatatgcagaaaagctatgattgctggagacagatagatccaagaacctaggtaatttttcagcaaactgtggttccactttcgcctctttcttgacattgactgtgtttttaacagggaaaaagttatctgaaatttttgatagagttcaaactttaaatcgtgttcactttgctaaaactccactggatggagtggcagaagagaaaaaacacagaaataaaagaaaagcagtaatggagaatggaaaatctttaaagatgctaccatcctgaaaagattcgaaagcaagcccaggaaagccacggggagggaaagagcgcttagaggtgtccccaaagctttcagaagtgatgagggaaaccccagctcttcttgttacttcttggcattttgttcctctatacgttagcttttggttaatctttcatgttacttattatctctgttttaaaatttcacattaactcattggtttcatatcccacttaacaaattagatattttccttgggcttattaagaaaattatttgctctcatatgttatggctttagattttctgtgtagctaggactgttcttaaatttttatctttacctttgttatttctctgaagcatccccattggggtggcagtggggggtattaaatggttatgtaaaatttacatgtaattgtgcaatttacacatagcctcaaatataatgaggcctagtctagctgcccataccaagaggatattatagttgccaataaaatcagtattatttcttttttttttctgttcttttttagcttcttgcaaacattcactcagaatcctttttgaatatcagttttgtgaaaagcaccgtgctgggttctttgggaaaagccaagatgagggcaaatgcatcctccttcctagtgagtctagcacacagatgactcaggaagtcatgcactggaggaggagtatcttctagaactggggaaaggttaaggaagggatcagaaacctttttcactcaaccaattacattttcctgaaagcatgttattaatcgtacatgatcttgcagaccccagatagagactatatcactatatcaattgttttcttgaacaactggagttaattctcatatgtttggttacccttcaagtatttatgtttaggatctgttttcttcctcttaacttacattccaaagtttaggtatccttcccctccatttgctgtccaaaacagcatcctttcatgtagctacatgccattggaatgatttggtttttgccatggattcctagtcctaaatttggacttttattggtatctaagatgtcatggacagaacccacagatgttgtacaaaaagggctgagtggacagtccaacagagttacatcatctgttccaaacacccttgtaatggttgtatcagcgtcaatgtctgagttgctgtcctggttctcctggccagtcctcagctggccatgcctgttcaggcaccagagaaagcttcatacctcaggcaaatctttacaagggatttgaaaggcaagaaacatgtattttggaggttttacctgtttatttcatgtatagcttcatattaacagattttgctatcacttaaaagtaaataaaatgattttgatttctcaaaatcatcttataatttattaatctattttaaggcttgcatttacatttaatcttcaaatcttgatgcattttcacagagtttctttagttagttaaggatattaatgacttcctttaatagttgatgaagtgagtcatcatcgacagtgagtcactaaggccaactcttgtacctgctcttaaatagcagttgttttactagatttgtactgaaacctttttaaaaatctgtttgtcttatatataacaagcatttccagtagttaataatactttcttagctcttcaatcattttatgagagcattacaagaaaagcaggagatggggaaagagatatcttgtttgccatgtaggatgcatgaaattcttacttagtctgttgtgttttggattcgagagaaaatatgtaatgaatcaaaatgtttcctacagtcctctgaaaagatgtaatgagacagtcttccagcagcctttgatcatctgggaagtcattgactttgatccttatcctatcaggggctcttaccctggggtccataaatacccaggcatttttaagaagtggatttcagtataacttgtttcattttgtgatttttaaaaatattttgttttatgcacttaaaaccttaatctgagaagtcatctgtagactataccagatttccaaatggaataaaaatatttaagaactctcttatgtgtgtgtttcaacctataaattttatatgtgtagctcatggttaggtggtaagtagagaatttgctatctgtgtaatatttggtactttttataatgaaaaaggaagtaatacaatgataggtaccatttatttgttgaccacccatattttccagggaatgtgatagatactttttatatattctttctagttttcaccataacatgctgcagggatagtgttaccattctcattttgcagatgaagaaattgaaacccagaacaattcgttcattcattcaaaaaatatccatagagcatacactaagagaaggcactctgctaggcaccagaaattgaataattgaccccaaatcacctaactcataagtggcaaagctggacctaacaaagcccattatcccttctatcacacattccatcctcataatatcatattctacatagaaaaacttaacagtcctgttgagacacttggaactctaagaaggtagtcaacagatacttttctctttatataaatatgatatctaattagcttttcctggaaaggagtgattctgcctttttttaattctagcattccctgagcaaattagagcccaggtaatgatttcctgagataagtcaattctcttctaggacaatctctagtcttgtcatcatgagatggaataacaacggtctatgtcatttcagtgacggcacctgcatgtccttgtatctaagaaaagacacctccttctctgccttgctaaatatttgtaaactttgctttaattggtatatgtgccactgttttgtatgtgggaggggtttatggttttgttttgttttttggtcttttttagtaaccccaatccaaactattctcatttgtaacctaaaatacttagaacaagaggctttgcaatcttgaagaccgaatacatttttactactaaatgtaaggcagatttgagccacccattttgtagtgcttgattatggcaacccgaggaaactaatacggttactctttatctttattaggaaatactgctgtagttcctgttgtaatccttagggagccaacattgttgatgagacctagtaccaagccagaggccatgttgaactagcaagatatgggatagtttttactttcaaagtaattagcatctagagtctagagagtttctcttacagggtggcctggtgtcttagtctattttctgttcctataatagaatacctgagactgggtaatgtacaaattataaagatttgtttgactcacaatcctagaggctgggaggttcaagatcagacagccacatctggccatcctttaatgagggcctcatgctgtgtcataacacagcagagaattggaaggagaaatgggcacatgcaaagagaaagaaaggggacgaaaggggctaactcactttgtaactatgagactaatccattccctggagaactaatttattctcatgagaaagacatgaatacatcttaacatcctaatcacttcttaaaggcctcaactctgtacactgctacattgtaacaggcaattaaatttcagcatgagttttggtggggacaaactacatcccaactgtagtacctagctacccactttatttttagagtggctatttaatgacctggcaagatctactgtgcttgtaaaagaatccaccatgggttaaagaaaaatagtttctggcttccagtctccttttggcctctctctagaatggcatatacaagttcagtggttactgacttcaaaggtggggtggaagacactgaaatgaatttttctcctttctttggttggttgctctctctctttgttgctgaaatttgtgtaggataatggaatgaatatgggagatagggaactatagaaagactggagggaagggagaagtcttttctgaattaaccccccatgtgcttgtgagacccttggaccccaaagggctcctgactggctgggcccactccttctgtatatggagccatagggcttttctctggcttcccagttgaagcattgtcatatgctttgatgctcagcatttctggcaattttaccttgtaaaactcccgtttcgacattctgaacttaagtagaaaatgggaatataagcctcttgttttttgctcttaatccattccagaactataagtccctgggttcttggcaacaacaggtgttcctctagattttaaatcaagtgtgtgtgtgtgtgtgtgtgtgtgtgtgtgtgtgtggaatatctcactaaaacgacagtgttgtcatcaattttggcttcatggagggtcttgagctgggtggagatgggaggaagctatccttgtccatgcggtttggagacttgctctaaaaaagagaccgtctacttccctcgtagtttttgttttgaagacatttgtagtgtttaccaggagcatacagttatctggaaaatgcagactgatgacaatagtatttgaaatgctcgtagatctgcttctaggttgatggaaagaatgtatgttccaaggtacaagtgcttgttgacttttcggatgcagccagtctgtgctctttgtcaggtaactcggaatcactccacagtagctgtccttcctgtccatttgacaagcacttaaaagggcagtcttaagtactttacttcatagtttattaattttttcccttctttagtttgcaatctactctcagaaactgaaaaataatttcttttacctttttcccctttctcatttaagctgaaattgatttctttctgagcgtgtaaggaaaaaaataaaaagaagctgtggttaatacaattgcctttgctgaacaaaaataaaagactagtttaccttcaagctgtgctgtatcagagtaaggatctgttctgtcactcccaggagattttgataagagagagtacaaaatttcataatatctacatagcataattgtagcaaatataagaagtattataattgtttatttggggatgagggtggggatgggtttttttgtgtgtgtttggaaaattgggaagctagaagatactcttaaatccatcagcttcttcagaactcttctcaaatgcttattgtcatgacaaccatctcttcataaaccaaggctctgagtgtaatacagatggggctggtaacaaggtaggattgccatctgctttgttttctctaagggacattatttttttgtgatccccaagtctcatcctcaaatctgaaagtcttgacttatttttctttctggagtcagatagagctgtgagattaattcttttctcctgacaaactacttcctcacctgtcatcaaacaacttacttgttaaatggagggaaaaaagggtaattatgtgtgtgtgtgtgtgtgtgtgtgtgtgtgtgaaaacaaatatacatattttaatgatttatttatctgtctactttgcaaagtctcctatgaggtacctagtaattcaataatacagtcaagtgtgagatccagaaacaagtaggagtgaggcaatcattttcccatgaaacaagtaaaattattactgcttttgaacattttaacacctgtgcttcctgatggtggggctgcatgaagtttgtaagtagtgtcatcattctcttattaggtaacaaataggagcataattatttaggagaggaaaaccttttcttgttaccaaatttggtgagaaatttgccaaagaaatgaatgcttacaggagggatacagcttaatatcttcatactcccctttgtcaaagatacaagtgacattttctcatatcaacttcctacaaaaagtgaggccatacatttttaaaaagaatatacccagtattttaaaagtttgtatatatcgtgatcagaattaagatatatccagcttttgaaaaaatatacatatttagccattaaaaggtatgtggtaaactaaactgatgaataaaggttatgggaaatatttcataaaatttatatttaaagtaaagaacaatttctctctttgtattatagttattttacataagctacaatctataattctaaaccttaatttcttgaagggctttataagcctcatttttctttctaaatagagaagttcatacactgcttttatgtcctatatgttgatgtgtaaaaataatcaaatactagtgggtgagtagaatgtaactacaatatggtacacacacagacacacaggatgactaaactgtgcacatgagctgatgtccagagcagggaaaagctgctaaagaatgtttgaagtagagtcagaatgcagttttgtggttaagaccaataatttttcaaaggagcattataaggagtgtggttacttgggttggagttgaaaaccaagcaacagttgggcagacttgaaaccagttttgtctttaggtttcttttcttaatgattggtctacaatgagttagccactcatcgtatttaaggtcttggtaaaggagagactttctttgccatgtagtttatacctcatgtatgcattacagtagagagctccaggaaatactgcaggccttctactggtttttatcctctatttagataaaaatgaggaagaagtagaattatcataaacaatcctgttggcttttagttgagatatactacagaaacatcacctttgaatctgtatatgtaaaaaaaaaaaatctcagagtaagatataagttctgttgcattgttctgaaggaatgggtaatgtcagaaatgtcttcattacattacataaagtaatacacagtgctgttatcagattgcatagtcaaagttggcaagtttgcatatttacatagatatcatgaccttcatcattcatacttctttcaagaaatggtcatcttaatatggggtatttatttgaggcatacaccatttattttaagaagcagtacctttgtttattgtaaaacttctggactaaattcttcaattttttctcaaatgaattcagttttttgttttttttcttaccactggtttttactgcatagcgtttgcctgaagaacaccactttgtttcccaaggcaagtagtcactacaaggcgagttttgttctgtctatcccaaggcaaatagacagcagcaaacatagtgtggagggctgctgggttcagtagaaaaccatcaactatttctaattgggggtgtatgaagacagctgcattctggacatgctaaacatcttgaaatgcttggagtgtaataaaaccccaaacgtgctttcttttctcatttctttgcacatgtattttaggcaaaatataatccacatgctgttgttccctctccttttaaatcatgaaaaatgttgtttttatagggctatttgaggtccaggatgcctttttatcctttttattaggttatttttatatataaatgaaaagaaaaacataaacagaaaatacaacatgacatcatgaatgagggcaagcacaaactgcccaatttaagtttgaagttataaacctaaaatattttaaaacaaaacatttctcttggtgttttgcaaaagtaatgctttcttctattgggcagaaattgcagcctgttgggatgaaggagagaatagaactaatatttattgagtagctaccatggctttctgggacatctgctaaccccttaatttttacagtaaccctaagtggtaggccagtccatctgcattttacagacaggaaatgctttcagagatattaattagatggctgtagaccacagaagaattgaaagtcaggtcttcttgacttttcagctcatgacttcattacttctgccctcctcattctgttgggagatgggtgggagtgtgccctccagataatcagaaagtcccatgttgggatgtgatttggaaatagctagtcctcaggcctgtggacgaaggctattgtagcctcaagaaagaaagagtcagcttgatattggcaaggtggttatttagtgtggcagctgcataagagcattggataggtggtatgatatgggatgggggtcagggtgagagctgctcacacctccttattatggcagggcaaaaccagaatagtcacagtgatggtgatgtagggtaggttcaagagaaagctcatgttcttctagcattgagactcacaatatttcaaaacaagtgattatttattccattactatttattttggtgatggatgttgcatttattttattttctaacagtagtacatatttggtaagagttgtttgtgacattctttatttaaatggattaaacccattttcttaatttttttaagtgtttgtcctgttatcgaagatatcttaaagtgttacagaatgggaatcatagctttaatgagtctgcatataagagagtccaaacattttttttttggagagaaggaaggtcatttcaactgtactataggaacgatagggcccatgatccatggtatggcaataagttactattttttggagaataaatcgcaaaatatgggacgtgaagactgcttggtatttacacaggagtctagttcttctgatactatatattctataagctttctcccagaaatccaaagttttatttagcttgtagccatcattgtgccacaatcttccttccatgatttatttttttcccatactgtactcttgcactgagtctttggcattgaaagggaaagagatgaattattcaactcttcttctattgagtgaaaagccaatacagaaaaaaaaatgcaacaggcaatttcatgactgacattttggagaacattggggtcatcatatgactgagaaaatgattatctcttttgaaggtcaggaaaccaatatttttttttccagtgaatctactgagggaaccaaccacctagctttttgtaaatagcactcctcagggaaatgttgcttttttcttttgcagtgtttctgctttgaatcttcatagactgtatcccatggaagcaggaatataattactgtagtgcttactttttttcatgtctctactgaagagccaccctgatttatcttttactccaaggtagtgtggaactttacaaggatttagattatattagtcattttgcttggagatctctgcacacttttcaacatcatttctaagagccttgccacactcagtaaaagagggtgaggcttcaagaatctctgtgtaccaacgcaaattaggcaatttgtaagaagtccctagtagagcagagtggagagagggctcaggatctcgtgaggcctggggcagggaggtggacatgctatgagctcctttcacagtcaacacaaagttaacacatcttggaggaaaaaccgttactgtataatggaaggcagaaggcagggatgtctgtgcttggtgatgaagctataagtagtgagctgatttatgatggaggggtgaattgtgccatgaaagagactcccctcaattttattagccagattactgcccatatgcggggtgaggagtgagcattttaaggcatttctctctgttttcaatatatcatctctggattcactattactgggacttgtgaatatagactagggattaaaacctgagtttgcttttaaaaaactttattttattaaatgagatttctgagcaactgatttcacttagtcttatcaaactattcttactactttttcgatatgcattctgtccctcctgtgtgaaggccacaggcccatggcccccatgtcattgagatggaggtcctcaagtgatggcgggatgaatcacctctcacttgccacctgcgagaatgtctatcactgatacctctccttatgtcccgtagcagctgctaagctcccacgttattattggtgacactttctagtgttcaggagagaacaggatttactttttgaatgcctctaaattattatagcaggttcatttggaattgcatatcagaacattcttcctgtttatcaggaaaataaaccaaggtcttgaaacttgatgtctatccatagttggcccaatataattttgcatgtggtttattacattatttttctccattggctatgaactgaaggcatctcatggatatttattccacgctgaaaaggtagttagatgctgtgtggtaaagtcgagaccagtatattggaagaaaagagacactccatctaataatctttcatagtcttcacattcattgagaaggttacttgataacctttcctgcacactctctcccaaccctgacccaggaacttgcagagcacactgtgcaacagatctaataacccttgtctgcaggcaatatgcacagctgggaaagataattaaatagactctttttgagaggtctacaacatttcaacggaaggatcgagcaatccggctggcctccgactgaaaactattaccaacagacatacttcagacagattccatgatcaccatccttatgtggcacaagtgcttatggggagcttctttggcttccaaaaggccactaaaactgtcagacctaaataatactggaactgtaaagtgggaattaaaaattataattccatttaacatgtaacgttctcatcagaaaggggcctttggttttccatattgatcggttacatggtcagctgcaattgtaactcatgagacacacccagatatcatcctgcgtgattctttttgaggtttatttagggtgttagataatccgaggtaggtttcatcatgggtggcaatattacatatagcaaatgtcatgagaagagagacaaagcctcccttttgaatgttaacatttatgcaataagtttaatgtaccgtgtaagtttacattactattatgagacttaacctaaaaaattggggtgaaatcttaaagaattatgaaattaagaaatgaaaccagagggctttcgttttaagtactgatcacttaaaccaaaaccagtttggcttatcctatgagatcgtgggtattgagaaagaggaacatttgctgctgcatccggagatgtttccttgagagcaagactagttccttttgacccagtacatcctacaggtaaatcactgcatgctgtagagatacctgttccctcccttcccccaccccctggggatctgaaaccaaatcattgctttttcatcttttacttatccttataaacaaagccacccactttctcatttttcctgatgccaagtccttctttacatgagtggaatccactcttttcaatggaaagacacctgctctgagacaggctacactgtcatgagccttggcatggctgagtgatgtagtggaaggtgcaataaatttaaactttaaaaatgcaaaatttgatggaatcatgcatcttgtgcctacagtgagtatatggtctagcaggatttacagatacatgcatgattaatttgaatacagtatagcaaaatgatctgttaaaaaacacatgaaaagatgtgcaaccttattagtcattaggaaaatgcacataaaaccaccgttcctgtgtgatacctctgtacgtctattagaatgtataaaatttaaaaagactgaacatagcaagcactggtgaggttgtagaccaactggtgctttcatgttttgctggtgagaatgtaaacattacaactactttgaaaacagtttgacagtttcttaaaaagctaaaacatccacctggcatgctatatacagatatcctactcttacgtatttaaccaagagaaataaaagcatatatccattcaaaaacttgtaaataaattgctcctagcagctttatttgtaatagccaaaaactagaaacaacccaaatgtccaatgaaaggatacatcgtatttatttataggacatatccatgcaatggaataccacttaggaatagaaagaatcaactgttcatcatacatacaaccacatggctaagtcttaaaaataattatgcttagttaagaagtcagacaaaaaggtaagagactgttaggagctgaattagcgggttaacagtggcaatgaaaaaggagaaaattatagctacctcaagatagaattgatgagctttgattatgaaatgatggtaagagagagggccatagactctgaggtctgtctctagctttggtttccctatgtggatcattatctatttggatataagaattatctgaaagatgatacttaagcatgtaagaaatgataagctacctgtttaatgatgagcttttgttacctccaagaaccccaagaagaaacatcctgtaagcagaccattcatacttgattgttaaaggaaaacaaaattccattttgtctttttcatcaacacaagtatagctggctaataaaagtgtaatattcatgagagaaaaagaaaagaacacgcacacacatacactcaacaggattcctagagtcattcccatggataagagggaaggaaaggttgagggcaaagagagaagggaaggaaacagactatgatgggatatcttagggcaaaagaatagggggctgatttggaaggcagcaaacttcatggatacttgatttatttaatgtccctgtcactctggcgtatcttaatgtgtgtggtgtgtgatttatttagtcacttgatccaaattctctaattaagtggagctcagaagatatagtgtccattgtggtcaagggcacaggttttggcttcaacagacaaataagctctctgagcatctgtcttctcatctgtacaatgggaatatcagttcctacctcttcaggttgttgtattcataaataaattgtgtacaagaaacattaggattgcttcttacccgtagtaagggctcaacaaaccttctcctccttctcctcctccttctccttcttcttcttcctcctcctcctcttcttcttccttttgcttttctccttccttcttccttcctttcttcctacctccttctcattattgttattaggtaaccacaatattatcagtaatgattggagaaagctttaatctcctagttcaccattagaaaacaagaacacattttggtggttattacccgaagtaatcataatgtcacctttttttccatctgactcattatcccaagtgatttatttatatatggagttttctgagtctttcttttacatattacaaaaaaagagtgtgatttagggacgaagcaaagaaataaaaatttagtgactttcattctgcctgtgccccaattcctattgggcataaggcaagtaatttaaatttcttagcaccttagcatcttctactcaaacagaaatgaggaacagtcacaggttactattatagctgtctaagtagaaggcacacaagttttcacactgagtataacactttatagaaagctaagtgtgttgctcaagttggtacatttctgtagatgtgacactatggcactaagaaacttaatgccacattgaaattcattgagatagctagactttaaaaataattacttgacttcactataaagtatgttcgtattgcatttactccatctagtagaaaatagaccttgtcagttcaaatccctgttgcattaatttcaccagtaatgagtctttttcatttgagtcagcagggtttttcttgcttgttttcaggctttgtggatttgaccctccatgatcaggtccaccttctagaatgtgcctggctagagatcctgatgattggtctcgtctggcgctccatggagcacccagggaagctactgtttgctcctaacttgctcttggacaggtaagtgacctggctgtagcttaggagtagcatgttctttacgatcatagttcattcatgaaactattttattcatctctcggtgaagcttcagagaactttattaggtatgtttacttaacaaaagagtgcattgggggtgatgaagcctagtcaaattcacagaaagctaaggataactttctgctagacattacctcagaagaattctattatttctaatacacacacacacacacacacacacacacactcacactctctctctctctctctctgtcattatgaatggtaattttctaactccatcttcaacttgtatcatataaaaattataataacctctctttaattaaaatctgttgttgcttcttgtacatccataccacaatagcctattcattttcttctccaattttcccatccgtaaaatgaagaaatttgaccagagttctgaaggtcacattcaggtcgacaaattcattttcatgttcaaatatgttaccttctttaacataccattctggggttgccttggaatgtgggtcccattgttttttttttttcagtcattgcttagagtcatagaatttagatattactcaatagcagctgccactgatagagtctccaccctgcaccagctgtgatgctaaacactttacatatattatctcatttaatcatcaccggactcctaggaggcaggaatgtcatcatccatgttttaccagaaaggaaactaaatctcagagacatcctgctacttgcaaaaagaggaaagctcactaaatggtggagccagagttcaaattcaagatctttctggctccggtatgctctgttacctcctgtgctgggcacatggtcttcccactctcatgttcagtgatgcctcctttggtctgctgccatagcattctgttttccaggtaaatcttgtctttgtgggctacataacattttggatgagaaagaaccattttgttgtttcttgcaatcctattttgcctccgtgccaagcagtctaaggctgccaggctgcccacagtgcatctctgcatggtactttacttcagagcatttcactatctttctacacctgccaagtgcctggagcagagttgcagcaaaatttatttaagtactggagaattgtacaaggtgttggttattgttttgtcattttgtgttaacacagcttttgaaaaacagtggtgatacagtttaagaagcatattttgctgtctgtggaatatattttgatatcacagtttcacaaaattatcaagaatggccactagtcttgttccttagaactgtactcacaatgtattctgtcagccttatagaggatgtctttaccgtgttctttcctttccattccttgtttcctttccattttttcctatctcatttctcctctcttttcctttgctttcctctttctttctttctcctgtcctcttaatttttttgtcttatagcagtgtggttttgtaaccaagtgatatcaagtttgcaaatgaaaatcttagaccacacgtaacatttccctgcctactgcctggagtgtctaccatgtttaggtttttggacattcataactcatttgctccttgatttccatcctcatctgtatctatcttcttttttaaaatttaattcaatttttataatgttgacacaattatgcagattcatagggtacacagtgatgttttgatacatataatgtgtggtgatcttatctatcttcttgagtacacacttgcttgaggacagtcatcaaataattgcattttgaatatgtgaaggtttttgacattactgcacccaaaaaactcatattgccagtgaggtgatatggcctaggattttatcagctacagccttctctttcctttctgtacactccagtggtggctaattttctttcctctctcacagaagtatgaatgactaaaagttctcatctctattcattcctactttctaaaacttcagatcggaaatttgaattacctctagaccaggatttgtcagtctctttactattgacattttgggtcagatcattctttcattctttcttggttgaggggttgatattgtttggtgtgtcctcatccaaatctcaaattatagctcccatagttcccatgtgtcatgggagggacccggtgggaggtaactgaaacataagcaaaggtctttcccttgctcctctcatgacagtgaatttctcatgatatctaatggttttataaaggggagttcccctgcacacgctctctctcttccccgttgccatgaaagatgtgactttgctccttcttccccatgattgtgaggcttccccagtcacaaggaactgtgagtccattaaacctttttctttgtaaattacccagtctcaggtaggtctttattagcagcttgagaacagactaatacaaggggctgtcttgtgcattttaggatgtttaacagcatccctggactccaccagctagctgccagtagcaacctccacttcctccagttacgataactaacaatgtctccggacatttctacctatcttctgttgtgtcagggggtgggggaggtaaaattgcctctggttgagaatcaccactctatgctttcccaactcaatgttctataagctcctcagacacactgtactctaaactgcacactcactttatcttctgcaacaagtctattccttttcttttctgtcttggtgacatcaacactcacctagacactaaagctagaagctttaagttacccatggattctaccttctccctcaccaaattatccagttaactatcaagtcatctatgaactgcttctgaatccagacctcccctctatccccattcctctgcatggcacaggtcctggttgtctctgctgcagattccttgcttctgcaccactgactcactttcttggtcctgctactctttctttcagtccatctcccatactgctgctggagaaggctttctaaggcacagctgtgatcatgatgcttcctgactcacctttcagtggctctctcaattcttaacatggagaaaccccatctctactaaaaatacaaagttagccgggcatggtggctcatgcctgtaatcccagctacccgagaggctgaggcaggagaatcgcttgaacatgggaggcagacgttgcagtgagccaaaattgtgccattgcactccagcctggatgaaattccgtctcaaaaaaagaaaagaaaatactgtgtagacttcttatcttaataatcatgaatcactattacaagtgtctcaaacgcaaatttctgaagagtcacaggtgacccagtgagcccttgtccaggctaaaaacacctggtggctgaattctgaacttcacacattcgaatttctcttccattgcttctgagagaccctccaccattacggttccttatcagagtcatatctacctataaggctcatttcaggtgccgtctttttataaaatcttccttcaaactttctcctcttcagcctttatatatacaaaaggcttttctttcttttccttttctaagtttccattgtagttggtttgcttttctctttattattctcattccaccatattagttatgattggatgtcttcttaccttccctactagctcataaacttcttgtggtcaaaaaccagatcttgttcgtcttgtgtgatctccagtttacgaagtcttccatgatacccaacaaatatttgttaattgcactggccaaggtcacccaggtggcttgtggccaaatcagaagaatctacatcttctgatagtcatggcagctgttattcccatccaactcacttcctgtgcattgctactcatcaattccccacttattcttttaaaaacattgcataaatacatatctatgtgttttggaaagattttcttaatctataagcgcatttggcgtgtgcttatatgtctgcttatatgccaaatttgaaattccaaatttcgccatttggaatttcaaatggggaaaagcaaagactcttatctttcccataatcaaaccccttatgaagtaaaatccttaaggtctctctacaggttaaaaataattaggtgatatgatttggctgtgttcccacccaaatttcacctttaattgtaataatccccaggtgtcaagggtggggccaggtggagataattgaatcatgtgggttgttttccccatactgttagtgtggtagtgaataagtttcatgagatctgatgattttataaatgggagtccccctgcacaagctctcttgcctgctgccatgtaagatgtgactttgctcctccttgccttccgccatgattatgaggcctcctcagccatgtggaactctgagtcaattaaacctctttcttttatatattacccagtctcaagtatgtctttattagcagcatgagaacaaactaatacattaggtatatgttaatgatgaggaatgtgtataaatacatatacatttatatttaaatattaatatttacaaataacatgatattaaaaatatggtctataattttttaaattatctacctttctaatcattaacatgcactaaatattattaaatttcaatattatttaattaccatcttggtgtttgaggataactgcttttgatggcattgatagatgcattaacagtgaaacattgtgaccaacagcccatctgagattttatacttgtagaagatggcttctgagtgacagctgagaagactgtttatgtctttgccctacaggttcctaacccctttaataaaatagagctctctgatgcagatgacacatgggccttctttttgctcttgtcccatcacattgtacatagtaaacatttttagcaacaaatagtagatacttataactttaaaagctaagtggttgacagctgagaggcagatgatggtaatttcatcatttttctcatatctcaggcattgtgacactacctctgcaaggtcaactgtctccataggctgttttcatttgcgtagaaataggggggaaagatagcttgaagtcatcaggagccctgcaacccatggattaccaatgttgctaactggagcctggatttcatcttcaattgattgtaatgatgtcttgttctctcaaatctttgcaaatctaggcatttataagactatcctgtaggtcccttacaagaccatgaggatgctagaacttaccctagtcttttcttgtaattgcttaaatgttagtattggcaaatggggtttggtgattataagagtaaaaaaacctgctgccatcccacatttgtgagcagaggatacatttcctatcttgtgtccatttaaaaagaatgattgcttgattggcttcctgatgacaacccatgatatactgattctgttagtttataactttcctagtagtcatatgcttataggccaattttatccttgccatgcttagcctagtcacaatttccagttcttctctgtatcctgcagcagtgagttccaaacacttaatgctgtcatctcttcctgtgaaaaccaagaaataaaggttattataaggtataaataaagaacccagtgatttctcttggggtgtgtgtgtccatgtgtgtgtatattttacaagaggaaagttaaagatactaagaatgcctgtgaaagtaatcaggaaatggagaaaacttgttttccattctagcacctaatcctttggtgtgttttggcactagaaaacacaaaatatgtcctctgtgtctactaggaatgcctctcttcatttagtcctgcttgagtgctcatgatggaaaaatatagactgaaaacaggagcaaaagtgttcatcctactcattccttgtggggtctctttgctttcaaagagatgttagagatgttagtaaatggtgttagaagaaacaatgtaaattgcctgtttagtaagatgatccagtttctaaggaactgttttactggcgccttccatgctaacaaattctgagaaatatttgcggatttctcagtgaagccaaagcactctcttttgactcctatttactctcagagaaaaaaactattcatccatttgaaaagcagggaccaattcaacaagcagaatattccctctactaagcctttggccagagagttgttgctctagttctttccatcactcctgcatcaggaggctctgcctgcaggaaatagtattggacaacagaaagttcttttacttgtaggcataaaataggtataaattctcctccttaagagaaaaacaggttgctgcaccagaaagaacatttgcctcttctactaaatagcagactgttttccaatgataaactcattttaaatagaaaaaaaaaagtcattctctacaaacaagaacattttcattttaggttgtttattgtaaatatttcagaaaaaaaatatgcaaaaaaaaaaatgcccaaaaatcaatgcttccagtaacatatttattagctatctttttccccatgtaaaacttcaggtaaattctttgcagattttttacttggaagaatgataaaaaaaaaaaaaaaagttctgaaatgagttgaattcatccacgtgtgtttttgattcacatgaagagtaggacctccctttatattccctcttcaaattctcccctctgaaaaatgggtggtacactcaaaggaggaccgcacacattgtagtagctggggtgttgggggtggaaggagcaggttttgggggtgggaggagcggtgagtgatcctttcagcaaagtcagtcctgggcaggagacggcttcaggaatactgtcagctttactggattccaccatcgctttccaggactgtttaggccctgggcccttgaagggtttgcgtgcctcttgtctccattcatacctcaagaactttgttcatgttaattttttttcactctatcatatggaattgagtaaaaaaagaaaaaaaaaaggaagccaacacttacttaactgctttaatgtataggactctgttctgggttgtcttctaaagtacatttcattcaatgtgtgagaatacagataggaaagagttttgctagtttctattttgactgtggatccattgattctttctggttctcagcccttaattgctcagctgcagataccacttgactgactcttaaaagtctttggtttattgcccaattctgggaatatgaaactgtaagctgtttaggagaaaaactgagaccaaaagaaaggagaagtgagccaaactgccattatgattgccacttcttattgaagataaatcaaaatatccatttgactagaaatcaattgaattatgcactttaaatgggccaattcaatgatacctgaactatatctcaaaaaaggtgttaaacacaggcacacacgtacacacacatattggaattccaggaaaagtcactttgatcaacaagattatcagtcgtcaaagtgcttggaagggttctattggaataaagctaaaaaaaatcaaagtaaaatttctccttaaaaacaaaagcaattaagcagcactgtattataaaatatgctaagctgcaagtcaaaattcttaagagacttaagcctgtaagcagtaaggatccactcaatgtaaagttactccagagggaaaggcgtgagcccaaccaaagtattaatgctgtgtaggaggttaatttgactcttcttaacatttttacacaccacattatgttttattcaccatttattattaactgaatttattaaagtataatcaaaataatatttttgagagtttaaaaatattctcataatatttaagttacatatactatgcagggaccgtcaagtaattccactctgacatctgtatttattaccgccacctgtccatgatggtattagaaagatcctcatttgttttaatggatgcctctaaaatccagttttaagagggggttggccactttcaagtttgtgttagttaggattcagtttaacccagctcaacaggtatttactaagtaccagcatatccatagggcgctgtatgatactggaggacacacagaaaagagatgtgtaagaggcactcctgccctcaaggagtttactattgagtggtagtgtaatatgaataaacaaatgaatctgctcaaaagcagggcattctaagcaggccctcaccagcctctcatcattcgcatctagtgtatcttcctccatcactttctaaacgctatggattctgagtgaaaaccaatcgctggtttatgcatgtatgcatatatgaattcattcttgacattgccatgcagagtatttagtataactagacttattatccatttatcctgcctagaagcatactgtaatatatataactctaaaagcaagatcattccttatgttggttcttttgagctggcagggggaaagcagagtatgttggcaggggtctatcaaggtagatgagcccagtttgtacatctttgaaatattaccaatgccaatgtgttagtactgcttggatctcttctatgacaacagttcttattttttccttttttttgtttgtttgttttttgagacaggatcttgctctgtcacctagacaggagcgcagtggtgtgatctcggctcacttcaatttccgcctcctgggttcaagcaattcttgtgcctcagcctacagagtagttgggattacacgcatgcgccatcatgcctggctaatttttgcatttttagtagagatggggttttgccacgttggccaggctggtctggaactcctggcctcaagtgatctacccgccttggcctcccaaattgctgggattacaggtgtgagccaccacacctggcccatcagttcttaatttgatgaatggatagaggtttggcttcaaataaatggagttagtctgtcaatatctgtttcttttaaaatttgcaattgtttttatttttagtgtcatgctatgtgcccttaatgatctagaattaagttctaatctctaccctggtataattgatttctccctgtggactcctaatataagaagaaagatgaagtttttcttttaatgcttttagagatcttcattaagtcatttaatattcttatttgctatttcccagtgtgatggttaagactgagtgtcaacttgattggattgaaggatacaaagtattaatcctgggtgtgtctgtgagggtgttaccaaaggagattaatatttgagtcagtgggctgtggaaggcacacccacccttaatctggtgggcacgatctagtcagctgccagcgaatataaggcaggcagaaaaacgtgaaaggggaaactggcctagcctcccagcctacatctttctaccatgctgaatgcttcctgcccttgagcattggactccaaaatattcagttttgggactcggactggctctccttgctgctcagcttgcagacagtctattgtgggaccttccgatcatgtaagttaatgcttaataaactcccctttatatatatcctattagttctgtccctctagagaaccctgactaatacacccagtgtgttcttttatcaaatagaaaggagatatagaaaacacactgtccatgtctttgattgttacaccacagcagagaatcaatttcttaacctgcttacttatttaccattctccaatggtgccaattctgagatccatcatgactttatcattagaaaaggggatgtaacaaacatgatgagatgttacgggaatactgcttactgcatgatatggtttggctgtgtcctcacccaaatctcatcctgaattttagcctcccatacttcccacgtgttgtgggagggacccggtgggaggtaattgactcatgggggtggtttctcccatactcttctcctggtagtgaataagtctcacaagatctgatggttttataaggggttttccctttcacttggctctcattctctcttgcctgctgccatgcaagacatccctttgctcctccttcatcttctgccatgattgtgaggcctccccagccatgtggaactgtaagtcctttaaacctcttttctttataaattgcccagtctcatgtatgtctttatcagcagcatgaaaacggactaatacactgcatgctcagtatactcaggcactctggaaactaggtttctacttcggacccctgagagaaaagggttatgtatctccaagtgtggtcatgacaagcatcactactgtgtgcagttgggcctgtggattgagccaccttagcctctgaggaaagcagaacctgagagcatgcttaattcagagtgtgtgtgacttggagtgtggaaaggaagatttccagatttgcggtattggcgactgaaaggatggcaatgctattgatggagattaggaagacaggagagaggtagatgttgagcaactccgaggagtttttcctcatacatgttgggtttaaagtgcagggaagatatcctgaaggttattccaggcagaaatttggagctcagaagagacatcagagctgaagataaaaaatttgagagccatctccgtagctaaaagtgtggaacgaatgtgatgactagacaagataatagagaaaaggtatccaaaggcctgaggtcaagacctcttaaaaggctgacttttcagggttttaggtagaaaaagagtcccagcctggggttaaggcagttttttgagaagtagaggtacaaagttccttgttccaaaggaagggtgtctttcaaaagaaaaaggatgggccgggtgcagtggcttacgcatgtaatctcagcactttgggaggccgaggctggcagatcacctgaggttgggagttcgagaccaacctgaccaacatggagaaaccctgtctctactaaaaataaaaattaaaaattagccgggcttggtggtgcatgcctgtaatcccagctactcaggaggctgaggcaggagaatcacttgaacctgggaggcagaggttgcagtgagccaagttctcaccattgcactccagcctgggcaacaagagtgaaactctgtctcaaaaaaaaaaaaaagagagaaaaagaaaaaggatggtgaattgggccaaataccagagagatggacaggagtaagaagaaaaagactaaagatttgttcatcaggagctcattgtttctaaagggagcatttttagtaaagaggaaggaggaataaaatgcagtataatatgttaaatctaagtataatttataaaagagaaaatgggggtggaatattacaaaaaaggaactataaaccagctctttgaggtatttgtcagtgaggaaaacagtggggctctagttcttgatagcaacagcatcaaagggaactttttaaactaaaatattatgaatttttcaaactgaaataatgagagaataatacaaagaaatctcatctgcccataatccaaattcagtagttattaaaattttgccccattgcttaatccattaatctcatttcattttgtcctttttctttgtttatttttggctaaaacattttaaagacaaatcctaaatatcatacatcagtaggcatttacaaaaaaatttcttgataatcacaatgccattctcataccaaataaacttataataattctgtgatatcatctaaaaaacagttcttttctacatcaaaaatgtctgtttatagttgatttattcaatttagagtccaaacaagttccatatattagacattaggtcattaatgtctgtctatttgaatttataacaatttccacttaatttattttctccagcttctgtggagactaggtaagttgttttgtagctgtctggatatatctgattgcttccttgcagtgtcatttaacttgttcctctatcctcagtgtttctgcacatggaagttagcctcatagcaggggttggcatactttagcctgcttaccaaatacgactcccttacatttttgtaaataaaatgttactggaacactgtcacatatgttggggtcatagaaagagtttccgtgtccccaagttataattgcattcacttatattttcttctagtaatttttacccttacatgttaggggtcaatttggaatttctcttcatatacagtatgcaataaagaatggcttttatatttttccaaatgtatattcagttgtctcaacaccatttattaaaaagtcagtatttctcaagtgatttgagatctacccttaattacacagtaaatttctctgtagtcttgtctttttctaatatgttaattctgtaccaagatttgttcatctgttaatggatcaatatcacatagctttgtttatagaaggtgcacattgttttaattctggccatgctatcccaccaaatattgccctttgatttttcagagttttactgtggattcttccttgtttctttttctatgtgacctttagaattaacttgtttaattctataagtaaatttattgataattttattgaaattatgtaaaatataaattggcttaggaagtactgatatctccatgacattaagtcttcatatctaagaccaaggggtgccttttcatttgttaaatattctttgtgtctttcagaagtgttttcaagtatccttatgtgtattttgcacaaatttttatatttgtgcctattggatgccacgtgcagggttaaaaaatattatacctattttatatagatatatatgtatataaaaatatatattatatatagttataatacataaatatattttaatatattatataatatatacatgtattgtatttatatatgtatttatatgtgtatctataaatatacatatgtatgtatctataaatatacatatatgtgtacatatacacatatatacacattatatgtatgtttatacacatataaatacatatataaatatactagaaagtccatggggtttcctagtatacaatcatattgtctgcaaatagagattgttataccttttcctttctattccaaagtgtctaaaagattttttcttagctagtggcattggatgacacctataatgtcttctaaaaatagtagcagtcataggcaccatttccttattcttgaatattcattcatgttacaaagtttataggaatttctgaattattaagtacttttaataggaatgaaggttattgtcattattgcatcaaaattcataagaaagtttggtgtcaaatttgtgctttgtgtgtagtcttcatcacgcttttttttttttttttaaccagtgttaaacatccattacaaaaatagtttggaagtttttctttttttttttcctatgtcctggaaggtgtaagtagaattggaattatttgatctttaagatgtaaaatattggtagaattctacctttgaaagcacctggacatggtgacttcttaataggtgagctctctggaaactttatttcttctgtagtaattggtctccttagactttctattccttctggagtcagatattgtatatcaaatcttctgttaaagttatccatttcttcttggtattccaatttttcacattgagttggacaaatgatttctgatgatgtttaaaaaatttctctggtttgatggttactttgaccgtataatttattttgtgtatttatgcttcttttagaaacttaggtcagctagtggttcctctattttgttgatttttttcctcaaagaactagcttaagtttattttattagttctactagttttctgctttctaactcattaagttatgcctttagctttattaaatccttcattctgctatcagttaatgttttagttcattttctagctttttgagttgatacttaatttattttcatttcatgatataggtaactgatgctcagaattttctcaaagcatcagttttcgctgggccccatagattctaatatatcttactttcattattattatttcctaaaaattcagcaatttcatgttttattttgtctctcattcaagagttgtttaatagacagtttaatttccaggttggatgggcattttgttttgttttttgttttactgtttataaatacttttggccttgggatcagagaatactgcttgtattacaattattactgaatatttttgtggtctaatataatttcagctttcaaaaatgttccatgtatacttgaaatgaaggtttatttacccttataaagatagaaggtaaaatattagctatgcccatgtctatttatcttcttataatttttgcttaatgaaaactaatgatccattatctgctgcataagtatttatgtttgctttctctttattatgccttatggcttttgtgttaaaaagctattgatttatttaatattttggaaggattgaattttaccctatctaatatcaagatcatgactcttgattcctttttgttttcacttgtttaatatatctttcttctatctttattttaaacacaagaagagctttgctttcagtttctattttacatagtctacaatcggattttacttattagtcaatctgagaatacttttaatagatgagttacacaaatacatatttattgataccaacacagtttaattcaagatctgttctattattttatatttattatatattaaattgtcttctttatttactatttattgatttattgaatttattttgctttcaggtattttgtatttttgttctggttgttagatttatgcatacttagtcaactcttcctttataaagcattcattttctactatgagcagtagtaaaattagctagtaacttaattcctgagcactctccagtcctagtcactagtaataacgcagtgttaaactttgtaatattaattatacttaagcctctattacttggtttgtcaaaatcaaatgatatcaatttacttccagcacatacctatgaggtaattgtaagctaataataacttccatggctattcttttctctttttttttttttgaggtggagtttcgctcttgttgcccaggttggagtgcaatggcacgatctcggctcactgcaacttctgcctcccgggttccagcgattctcctgcctcagcctcccaagtacctgggattacaggcatcagccaccccacctggctaattttgtatttttagtagagacagggtttccccatgttggccaggctggtcacgaattcctgacctcaagtgatccaccccatcagtctcccacagtgctgggattacaggtgtaagccaccgcacccagcctctcatcttatttttattacttatatttttctacattattagaagttataatacttatatgcacatttctttagccccaaccccattttttgatattagctctattattaagatatttaatgtccaccttcagattatatgctgatgattctctaatcgtttttggttgtctggagcttttttactgtttattttcaggaagagctcatgataactcttttttctttggtttaaaaatgtttataattatttttctctggactttatgctgagaaatttggctgcatacaaaatctctggcttacattttttctcaagtatttttaagtgattgcttcattattttgtagtataaaatgttgctcacaagaagctggatgccagtctgattttctttccctcattagtgatttggactttttgtctgaatgttgaatttttaaatataaacataaattgcaatacttttattaagatatgtctctgcattgaacattttaggtccgttttcctaggtacatagaatgtcttttgaatatgtagactcaaatcagacttcttgattctcttgatttatagttttaaatatttgtttgggggcgggtgcggtggctcatgcctgtaatcccagcactttgggaggccgaggcgggtagatcataaggttagcagattgagaccatcctggataacatggtgaaaccccgtctctactaaaaatacaaaaaatatagccaggtgtggtggcaggcacctgtagtcccagctactcgggaggctgaggcaggagaatggcctgaatccgggaggcagagcttgcagtgagccaagatcacgccattgcactccagccttggcgacagagtgagactttgtctcaaaaaaaaataaatagggggcggttccaagatggcagaataggaacagctccagtctgcagctcccagcatgagtgatgcagaagacaaatgatttttgcatttccaaatgaggtaccaggttcatctcactggggactattggacagtgggtgcaggacagtgggtgcagcgcaccaagcatgagccgaagcagagcgaggcatcgcctcacctgggaagtgcaaggggtcagggaattccctttcctagccaaggaaaggggtgacagacggcacctggaaaatcgggtcactcccaccctaatactgggcttttccgatggtcttagcaaacggcacaccaggagattatatcctgtgcctggctcagagggtcctacacccacagagcctcgctcattgctagcacagcagtctgagatcaaactgcaaggtgcaagcgaggctaggggacgggcgcctgccattgctgaggcttgagtaggtaaacaaagtggctgggaagctggaactgggtggagcccaccgcagctcaaggaggcctgcctgtctctgtagactccacctctgggggcagggcatagccaaacagaaggcagcagaaacctctgcagactgaaatgtccctgtctgacagctttgaagacagtagtggttctcccagcatgcagcttgagatctgagaacgggcagactgcctcctcaagtgggtccctgacccccgagtagcctaactgggcacaccccagtaggggcagactgacacctcacatggccgggtactcctctgagacaaaacctccagaggaacgatcaggcagcaacatttgctgttcaccaatatccgctgttctgcagcctccgctgctgatacccaggcaaacagggtctggagtggacctccagcaaactctgacagacctgcagctgagggtcctgactgttagaaggaaaactaacaaacagaaaggacatccacaccaaaatcccatctgtacgtcaccatcatcaaagaccaaaggtagataaatccacaaagatggggaaaaaacagagtagaaaaacagaaagttctaaaaatcagagcacctctcctcctccaaaggaacgcagctcctcaccagcaacggaacaaagctggatggagaatgactttgactaattgagaaaagaaggcttcagacgatgaaaattttctgaactaaaggaggaagttcgaacccacggcaaagaagttaaaaaccttgaaaaaagattagacgaatggctacctagaataaccaatgcacagaagtccttaaaggacctgatggagctgacaaccaaggcacaagaactatgtgacgaatgcacaagcttcagtagctgattcaatcaactggaagaaaggttatcagtgatggaagatcaaatgaatgaaatgaagtgagaagagaagtttagagaaagaagaataaaaagaaatgaacaaagcctccaagaaatatgggactatgtgaaaagaccaaatctacgtctgattggtgtacctgaaagtgatggggagaatggaaccaagttggaaaacactctgcaggatattatccaggagaacttccccaatctagcaaggcaggccaacattcacattcaggaaatacagagaacaccacaaagatactccttgagaagagcaactccaagacacataattgacagattcaccaaagttgaaatgaaggaaaaaatgttaagggcagccagagagaaagattgggttacccacaaagggaagcccatcagactaacagcggatctcttggcagaaactctacaagccagaagagagtgggggccgatattacacattcttaaagaaaagaattttcaacccagaatctcatatccagccaaactaagcttcataagtgaaggagaaataaaatactttacagacaagcaaatgctgagagattttgtcaccaccaggcctgccctacaagagctcctgaaggaagcactaaacacggaaaggaacaactagtaccagccactgcaaaaacatgcaaattggaaagaccatcgaggctaggaagaaactgcaactaacaagcaaaataagcagctaacatcataatgacaggatcaaattcacacataacaatattaaccttaaatgtaaatgggctaaatgcttcaattaaaagacacagactggcaaattggataaagagtcaagacccatcagcgtgctgtattcaggaaacccatctcacgtgcagagacacacataggctcaaaataaagggatggaggaaaatctaccaagcaaatggaaaacaaaaaaaggcaggggttgcaatcctagtctctgttaaaacagactttaaaccaacaaagatcaaaagagacaaagaaggccattacataatagtaaagggatcaattcaacaagaagagctaactatcctaaatatatatgcacccaatacaggagcacccagattcataaagcaagtccttagtgacctacaaagagacttagactcccacacaataataatgggagactttaacatcccactgtcaacattagacagatcaacgagacagaaaattaacaaggatatccaggaactgaactcagctctgcaccaagcagacctaatagacatctacagaactctccaccccaaatcaacagattatacattcttctcagcaccacgccggacttaatccaaaattgaccacatagttggaagtaaaacactcctcagcaaatgtaaaagaacagaaattataacaaactatctctcagaccacagtgcaatcaaactagaactcaggattaagaaactcactcaaaaccgctcaactacatggaaactgaacaacctgctcctgaatgactactgggtacataacgaaatgaaggcagaaataaagatgttctttgaaaccaatgagaacaaagacacaacataccagaatctctgggacacattcaaagcagtgtgtagagggaactttatagcactaaatgcccgcaagagaaagcaggaaagatctaaaattgacaccctaacatcacaattaaaagaactagagaagcaagagcaaacacgttcaaaagctagcagaagacaagaaataactaagatcagagcagaactgaaggagatagagacacaaaaaacccttcaaaaaatcaatgaatctaggagctggttttttgaaaagatcaataaaactgatagactgctagcatgactaataaagaagaaaagagagaagaatcaaatagatgcaataaaaaatgataaaggggatatcaccactgatcccacagaaatacaaactaccatcagagaatactataaacacctctacacaaataaactagaacatctagaagaaatggataaattcctcgacacatacaccctcccaagactaaaccaggaagaagctgaatctctgaatagaccaataataggctctgaagttgaggcaataattaatagcttaccaatcaaaaaaaagtccaggaccagacggattcacagctgaattctaccagaggtacaaggaggagctggtaccattccttcggaaactattccaatcaatagaaaaagagggaatcctccctaactcattttatgaggccagcatcatcctgataccaaagcctggcagagacacaacaaaaaaagagaattttagaccaatatccctgatgaacatcgatgcaaaaatcctgagtaaaatactggcaaaccgaatccagcagcacatcaaaaagcttatccaccatggtcaagtgggcttcatccctgggatgcaaggctggttcaacatatgcaagtcaataaacataatccagcatataaacagaaccaatgacaaaaaccacatgattatctcaatagatgcagaaaaggcctttgacaaaattcaacaacccttcatgctaaaaactctcaataaattaggtattgatgggacctatctcaaaataataagagctatctatgacaaacccacagccaatatcatactgaatggacaaaacctgggagcattccctttgaaaactggcacaagacagggatgccctctctcaccactcctattcaacatagtgttggaagttctggttagggcaatcaggcaggagaaggaaataaagggtattcaattaggaaaagaggaagtcaaattgtccctgtttgcagatgacatgattgcatatctagaaaactccatcgtctcagcgcaaaatctccttaagctgataagcagcttcagcaaagtctcaggatacaaaatcaatgtgcaaaaatcacaggcattcttatacaccaataacagacaaacagagagccaaatcatgagtgaacttccattcacaattgcttcaaaggaataaaatacctaagaatccaacttacaagggatgtgaaggacctcttcaaggagaactacaaaccactgctcaacaaaataaaagaagatacaaacaaatgcaagaacattccatgcttatgggtaggaagaatcaatatcatgaaaatggccatactgcccaaggtaatttatagattcaatgctatccccatcaagctaccaatgactttcttcacagaattggaaaaaactactttaaagttcatatggaaccaaaaaagagcccgcattgccaagtcaatcataagccaaaagaacaaagctggaggcatcatgctacctgacttcaaactatactacaaggccacagtaacgaaaacagcatggtactggtaccaaaacagagatatagaccaatggaacagaacagagccctcagaaataatgccatgtatctacaactgtctgatctttgacaaacctgagaaaaacaagaaatggggaaaggattccctatttaataaatggtgctgggaaaactggctagccatatgtagaaagctgaaactggatcccttccttacaccttatacaaaaattaattcaagatggattaaagacttaaatgttagatcaaaaaccataaaaaccctagaagaaaacctaggcaataccattcaggacataggcatgggcaaggacttcatgtctaaaacaccaaaagcaatggcaacaaaagccaaaattgacaaatgggatctaattaaactaaagagcttctgcacagcaaaagagaaactaccatcagagtgaacaggcaacctacagaatgggagaaaatctttgcaatctactcatttgacaaagggctaatatccagaatctacaaagaactcaaacaaatttacaagaaaaaaacaaacaacaccatcaacaaatgggcgaaggatatgaacagacacttctcaaaagaagacatttatgcagccaacagacacatgaaaaaatgctcatcatcactggccatcagagaaatgcaaatcaaaaccacaatgagataccatctcacaccagttagaatggtgattattaagaagtcagggaaaaacaggtgctggagaggatgtggagaaataggaagacttttacactgttggtgggactgtaaactagttcaaccattgtggaattcagtgtggcgattcctcagggatctagaactagaaataccatttgacccagccatcccattactgggtatatacccaaaggattataaatcatgctgctataaagacacatgcacacgtatgtttattgcagcactattcacaatagcaaagacttggaaccaacccaaatgtccaacaatgatctggattaagaaaatgtggcacatatataccatggaatactatgcagccataaaaaaggatgagttcatgtcctttgtaaggacatggatgaaactggaaaccatcattgtgagcgaactatcacaaggacaaaaaaccaaacaccacatgttctcactcataggtgggagttgaacaatgagaacacgtggacacaggaaggggaacatcacacaccggggccttttgtgtggttggggaggggggagggatgcattaggagatacacctaatgtaaatgacgagttaatgggtgcagcacaccaacatggcacatgtatgcatatgtaacaaacctgcccattgtgcacatgtaccctaaaacttaaagtacaataaaaataaataaataaataaataaataaatactagtttggctgcattgctttgattttcttctttaggggcctgttcatacatacaaaggataccatttacctgtcttctatatgactttctcttaaatcctttcattcttttgttttaatttttatcttcacatcctttatttctgtcactgtgctgtccatagagtttgtctgctgtgtgtccttataattaagtctatgttctgaatgtttttccttttttagaaattcagttctaaagtgtttaatttctcgtatttttttttctgttgcctcaccatatcatttctgagttttctgtttctgaaatgtgcaactaactctttccaagcattgaccagattcttcagtctttttaattcattctgaaataactgggctacagtttcatctgctttgtggacagaagtgccacaaagagccgaattgtcagtgcagacccacatgaatcatagatcttaacgaggtttttactaacgactagcaaaggatacaagctaaaaatgggtacaagcaaacacagcatcattcatcactgtaaagactctgaactatcacatggaacttcaaaaggattcttcttctttgctgcaatgtgttttgatttttggagtgatagatgtttgctaactacgcacgtgacaaaaatttgcttagaggaagccatgttagttttgatgctactcaactttgtattttgttagtcatgagatagaaagcctgtgagattacatgcccttcttttagcagctgcatcccataaaattaaaaattccagttttttttaaaccatgaacaatttagtcagacttaatatatcctatttaaaacattcttagataagaacttcctttgttattttgctaatatacaatcccaccaaatgtctacaagaagggctagttaatcaatataccaaagatcaaatctatttatatgaaccacaaatacaaaacataattatacatatataattttatataatttaatttataattatatacattttatagcagcaatcaaaactatcatgtattttgggatgaatttaataaagaaatagcaggagctctgtagaaacaagtatgaacttctattggaagacagtaatatcataaaacattaaaaagaaagctataccatgtttatggttaggaagattcactattgaaaatacatcaattcttgacaaatcggtctataaattcagtgcgtgtccaatcaatatatttagctcatttaaaatgtatatggaaaaggctaagtaccaaagataatcaaatgctcttggaagatgaaaattaaagttgagagatggggtaaaaaactataattcagttctaaagtcataaagctataataattaatacagtatggcattggcatagaaataagcacattgactaaataaatagaaaatacagttcagaaaccaaactctacatttatgaaaaactgacctatatcagaacgagcattgagactacaggagaacagaggaactagtaagttaatggtcctgacacaattgatatctacatagaaaaaaaaacttaatccttctttactctatgtaaaaacaataattccagatgaatgtaggacttaatggagagccaaaactaaaacttttataggaaaacatagaaaaatacctatctcagggtcgggaattaggtcttcaacatggcaccaaaagtactaaccataaaagaaacattaataaagtcaacctttttaaaatcaacaactttaattaaaaaaccagggccaggcacggtggctcacgcctgtaatcccaggaggccaaggcaggcagatcacgaggtcaggagatcgagaccagcctggccaacatggcaaaacctcgtctctactaaaaatataaaaattagctgggcgtggtggcgggtgcctgtagtcccagctacttgggaggctgaggcaggagaatggtgtgaacctgggaggcggagcttgcagtgagctgaaatcgtgccactgcactccagcctgggcaacagtgcgagactccatctcaaaaaacaaaaacaaaaacaaaatcaaaacaaaaaacaaaacacaggttgctggaaaaatggttacttatttttattatgctttataaaatatacagttatattatcaaacttcttttgtaagaatcaaatattatgctgagaatatggcaagaaaaaagaaaacaacctccaccactcataatggcattccctttacccaccatcaactaagtcaggaacctgcgtcactttcaagttttctgaaatgtggactgaaaatacttgtggagggccctcacagatgcatttagaaatggtatgttctggaaaatggaactgaaatgttttagcgagagtcatgggcccaaaccttgaaatagaggttggtggagttttctatagtatgtaattacaacacaataagactcaaaagcatttcaataaagtgtggatggaagacaagatactgcttcaagggcttcattagctttctgcagactggagctctccaaggcatggggaggaaccctgtttacctttggttcagaatcagttttaaccatcattgagggctaggtcagagtgcagcattaagtccttgggaatacactgggtggggaaagaaaagagagcaatgtttttctaaaagcccagaaatgggcttactgtgtttaccagttgtttccaggataatgtattgcagtgccaattgctgatgagatggtaggattatacttcagtccctgctttacatttatttcttaaagaagcttctggtaaattagagcaatagcatcggcttagtttagtgttgttctgttggactaaggatatcagttctatccgtatggtcgggcctaaagcctgggaaatatttaatgaagggagagagggggagagagtgagcatgcaaaagagagagagaaaaacaaataacaaaacaaaaaccaagacatttccctttatagtaagaatgatgaggaaaacatgtttagccatacaagatatcaagataatctcttatttctttcttgaaaatgcaagtacaaatgcctgcaaagataaaatatcctctggatggagtggaaaggttcaccaggcctctgaaatcacgtgaatgatgttgcgctttgctgttaatgaagctcggtgcatttttcatttcagtttctactaagcatttatgagctattacccttcccttccctaaactgcgttgttttttaaaaagccttagaggcattccttctagaaaataaaggtaagtgttaagtggtgataatttggtaataggtgtcatgcttgtggttcataatgtgttaccctacacattttctcaattatccctagaacagctttttgaggatatgaagttagaccttacaaagcacatctttctgctggaaaaatgaggtttatagtggttaagtttagttgcttatgatcacaaggctagagagtggccggaatcaagactcttcaccctgatttcagtgctttttcactccaccattaatatttattgttgataaataatatcaacactttcctaggtgtattagggtcatctagagggacaagactaataggatagatgtatatatgaaaaggagtttattaaggagtattgactcacaccatcacaaggtgacgtcccacaataggccatctgcaagctgaggggcaaggaagccagtctgagtcccaaaacctcaaaaatagggaagctgacagtgcagccttcagtctgtggccaaaggcccaagagcccctggcaaaccactagtgtaggtccaagagtccaaaagctaaaggattggagtccaatgtttgagggcaggaagcatccgtcatgggagaaagatggaagccagaagacagccagtctagtccttccacgttcctctgcctgcttttatcctagccacgctggcatgatgatgacatggtgcccgcccagattgaggatgggtctccatcttccagttcactgacacaaatgttaatcttctttggtaataccctcacagacacacccaaggacagcactttgcatccttcaatacaatcaagttggcactcaataataaccatcacaagtccacaccttgtcaacttgatcccacatacatctccttaaatcatacatgatctccaaatacagacaataatgtcataattacactgaacataatacaactatcgttcatacaaccagaaatgcaccaattcccaaaccaaatgttattacataaagttaacaacacttaaatgctgatatgaagtcaataaatactttttttttttaaaagatggagtcttgctttgttgcccaggctggaatgcagtggtgcgatattggctcactgcaacctccgcctcctgggttcaagcaattctctgcctcagcctcccgagtagctgggattacaggcacccaccgccacacctggctaatttttgtatttttagtaaagacggggttttgccatcctggccaggctggtcttgaactcctgacctcgtgatccacccacctcggcctcccaaagtggtggatcccaaagtgatccacccaccttgacctcccaggttgtaagccactaaatcttatgtcacatgatacaggaaaaagaaaggaagtaaaatgaagatattgtcttagtacaagtgtatacaggcagaaagatgttcttaacaaaataaggaggaaatactcatgacaattacagtaacctggttgctgcaactcatcacatggtcgtagctgttattgatgactaccttcttctacaacccattctgttttccctttgcctctagcaagtacctcagcaggtcatggttctttacctggtggagtgtcccaaaccttcattcctgaagggtctgggccatttgtagtcctgcctggatcgagttgttgtcattttttattgaccttaatcacagggcttggtaatactaagagacaccctaaggaatttcctgtattccacacatgttcttccttaccttcattatggagtagtagactgagttcatcttgataggctaagtcagtcaccccagccaacactaactcctttcttagcctgttgacttagaggtaggaggagcccgagattgcaatcttaatttccagtttaatgaaatcattattgtgtctcctggtggcaacattcatcgccctggaactgagacttctaggccagcagaacgtaatgctgtggaacaagaagcacaaattttactagcgggtctctaggggtgatggtgagtggtgccacttccatttccaccccttgattcctggacccatgaatcctggctatgggagaaacagtaccaaatactggacactgatccggagcatacacagccttctggaaaactttgccccagccctgcaaagtattgtcgcctagttggcattgtaattgtgacttcaaaaggccattccaccgttctatcaatccggctgcttcaggatgatggggaacagggtaagaccagtgaattccatgagcatgagcccactgctgcacttctttagccataaagtgagtgccttgttcagaggcaatgctgtgtgtaatgccatgacagtgggtaaagcattccataagtccatggatggtagtcttggcagaagcattgcctgcaggataggcaaacccatatctagagtaagtgcccattccagtgaagacaaaccactgttctttctgtgatggaagaggttcagtataatcaacctgccaccaagtagctggctgatcaccccgaggaatggtgccatatcgcggcctcagtgtttgtctctgctgctggcaaattgggcactcagttgtggctgtagccaggtcagccttggtacgtggaagtccatgttgctgagcccgtgcgtaacctccatccctgccaccacagccactttgttcatgggcctattgggcgatgacaatggtggctggggaaagaggctgagtggtatccacagaacgagtcatccaatccacttgattattaaaatcctcctctgctgaggtcatcttttggtgagcactcacatgagatacaaatatcttcacagtttttgaccactcagagaggtccatccatccacatacctcttccccaaatttcattgtcatcagttttccaatcatgcttctttcaagtccctgaccatccagccaaaccattggctacctcccatgaatcagtatataatcacacatcttgccatttctccttctaagcaaagtgcacagccaggggcactgctcaaagttctgtgcattgggaagatttcccttcactgctgcccttcagggatgtcctagaaaggggctgtagtgctgcagctgtccacttttgggtggtgactgcatcatgcagagccatctgtaaaccaggcccttgtcttctcttcctctgtcagcttatcatagggaactccccatgaggccatcagtgcaggctgggggagagaaggcagggtggcaggagtggggaccatgggcatttgagctacttcctcatgtaaagtacttgttccctcaggacttgcttgagcctgatcatgtatataccacttccatttgatgatggaatgctgctgtgcacaacccactttatggctagatgggtcaaaaagcatctagttcatgataggcaatttaggtagcttggtgatttgatgacctgtagtcaaacatacagtttctaccaaagcacagtaacaggccaagagttgtctctcacaaggagagtagttatctgcaggagatgcagggccttgctccaaattcctagaggcctcccctgtgattgacctataggggcctgccaagggctccaaacaacatccctatctgccattgacacttcaagcaccattggatctgccaggtcatatggcccaagtggcagagcagcttgccaagcattctggacctgttgcagagccttctcttctggatcccactcaaaactggaagcctttcaggtcacttgataaatgggctggagtaacacacccaaatgaggaatgtgttgcctccaaaatccaaataggcctgctaggcattgtgcctctttcttagttgtaggaggggccaaaggcagcaacttatccttcatcttagaaggaatatcttgacagaccccacaccactggacccctagaagttttactgaggtagaagttccctaaattttagtcaattttatttcccaacctctggcacacaagtgtctcaccaataaatccagtatgtttgctacttcttgctcattggatccaatcagcataatgtcatgaatataatggaccagtgtgatatcttgtggaagagaaaaactatcaagatctctccaacaagattatgacacaaagctggagaatcgatatacccctgaggtaggacagtaaaggtatattgctggccttgccagctgaaggcaaattgcttctgctgggccttatggacaggaatggagaaaaagccatttgccaaatcaatggttgcataccaggtaccaggagatgtgttaatttgctcaagtaatgaacccatatctggtccagcagctgcaattggagtcaccgcttagttaagcttacaataatccactgtcattttacaagatccatctgtcttctgcacaggccaaacaggaaagttgaacggggatgtggtgggaatcgccacccctgcatctttgaagtccttgatggtggcactaacttcctccagggatgcaatgttgtgtttgatttactatttttctaggtagaggcagctgtaatggcttccatttggcctttcccaccataatagccctcaccctaccagtcagggagccaatgtgggggttctgccagctgctaaatatgtctatgccaattatgcattctggcactagggaaatgaccacaggatgagtctgggacccaccagccccactgtaagttggacctgagctaaaattccattaattaactgatctccaaaagcccctactttaactggaggaccacgtgatgttttgggtcccctggaatcaacgtcagctcagagccagtgtccagttgtccctgaaatgtctgattatttccctttccccagtgcacagttaccctggtaaaaggccagaggtctcctgggggaaggatgggagaaagagtcactgcataaattgtcagcaatgtagtggggtccttcctcaaggggacccagcctccccttcattcaaggggttctgggtctataaactggttcaagtctgcaaattgattgaggggccgtgattctttgtataatttttaatttaaattagtcttttgtctacttgacctggaagttttctgcttatataaattaagcaagaatgcagtaggcctcttgtcaatttcactttttaggaacactgagattaagtagccaatgccagagctctacacaagtcagactattctgattgttgccttgcctccgctgacctttacggtaattgcacccaccttgccttgatgcttgagtgccaccacttggcccatgccacctcaggatccaattattaccattgtatttaaattttgtagttgaatgactgtggttcccactataatatctagcatgcagagaagagcaatcacagagctcttcaaggatgcaggtgctgccctcacaaatctatttcacaatgtgctggtcaaaggtatatcttctgtactctcccagctgggatgagtaggactaaagtgacgaattcactccaccatcccagtctccataagcctttggatcccttcctctacattaaaccaagggagatcaggcatttccagctcactcacagtgggccaccttttgatctatatttcagctaaccaagcaaataaactattagaaccttttttaactctccaagctgcaacattaaatgcagaattcctgcttagtgggcccaaatcaatcaattcagcctgatccaactttatgttccttctaccattagcccacacccttaatatccattcccatgcctgttctccagatttctgcttatataaattagaaaactcaagcagttcttttggagtgtagcgcacctccttgtgggtcacattctgaacctcatctctaaggggcctgccgggactttagtctagttctataactataagcaaacaggggtattgagggtgggtccttaggagaatcaacatcgtctttcctggcaactgcctcaagggaggtcatcgctgatgccttaggcagtgcagggttaaactcctcagacaaaggtgaaaagcctgatggcagcgcaggtggaggaggggatgttgcctcccctctgttgcctgtttcctctggtaaaaaagattcatcagaatttagaagctcagtgcccccagccttatcagggtcctcccgcatggccccattccaagttgcagggtaccattctttttcaatcaatgctgtcactttaacagtaaacacctggcaaggctgtgcacgtacctttcgttgcaggtcagccactcacatgataagagcttgtgtctgattttccgcaatttcagctctttctctacaggagataagactcgaacccagggcaatcttagaagatttgaggctcagaatgtggttctggagctgggagatagaatccctgagttcatcatttttttgttttcatcactttgattagtgaacttaggagcaaccaactagcttcattatattccttggttctccacatatggttaaaggtattaggtataaagtcactaaactccttgcctctcatgagcagtgaatcaggagtatcagatgcatttattttgcataactctctacacagttcacagcaaggactatcagtgttctccacactattagaagtagagtccctagcattttggcgtctaatcatatttagcagccaactccagaaaccccaaaaccatctaaagaaatccatccgtaaaattctgttcctctagaaccactcctggtaccaaaatctgtattagtcaggattcgctagagggacaggactcacaggtgagatgtatatataaaaggcagtttattaaggagaattgactcacacaatcacaaggtgaagtcccacaatagtctgcaagctgaggagcaaggaagccagtccaagtcccaaaacctcaaaactagggaagccgacagtgcggccttcagtctctggctgacagcctgagggcccctggcaaaccactggtgtaggtctaagagttcaaaagctgaagaacttgtagtccaatgttcgaggccaggaagcatccagcacaggagaaagatggaagccggaagacttagccagtctagtccttccatgttcctctgcctgtttttgtcctagccatgctggcagctgattagatggtgcccacccagattgaggatgggtctctatcttccagtccactgactcaaatgttaatctcctttgacaacaccctcacagactcactcaggaacaatactttgcatccttcaattcaatcacattgacactcagtattaaccatcaccctaggctttagggatatagggaaaaacatgactcattgctgttatctgagagtacataatctattggaagaaaggaaaacagttacatgtaaggcttatatcagtataaattagataactgccaagtgagagaggtagaggtagcaagtgctgtctgtgggtgcatgttaactcagtcttaatcttggaagaagtggcagtgtggaatggtacatggagaagcagaagggacaattactgtgagcagatgaatggctcactacaggggcatgggaagaagatgcaagagcagtggaatctttaattgacgaacctggtaccaagctgccaagtcttagtctcaggactggcaccgtgcacttggccattgaaaagactttggaacctgtggagtgaagagttgtaggaattttcaaagcctcagtgtaggaacaatgtgagaatcaaccagggcatggtactccacactgtgttcagatccactggtgttaggggagtcccagagaggcctcttagagggttgaggaggatgggatcaggcatagcagagactagggacacgaggctctgcggccagactgcaggtctgctaccaactacagtgtgattttgcctagtcacataatctctgtgggcctcagttttttgttttttgtttttttctattacaacagtacctttctcgtggagttgtagtgattagatatctagtaccaagactatgcttgttagcactgagtaagaactcaatgaaggttagctttcattggtactatattactattgttagtgttggtggtggagctgaatcgcctaacctatgaggttggtgctgaaatgaagaaaagaataacagtgttttaagaagtttggtcactagaagtggagcttagtaattaaagaaaaagagtgaacacttttaccttcttgtggaagttagtaagtctacaaaatgttaattctgcatttgaatgatcatttgggagactcttattgtcctatttgcactgaaaaagtcactgaatcattattttagaactggaataacacctgagatctaggccagcactttgcaagttgtgctctatgggacttttcatggaagtggctgaggagttgccttgaaggaaggcagagggagtgggtcttgggacacccttccagttataaaacaggacgttgattctgttttgtagttgcagcatcacatataatttcatttattaagaggatcccacttctaaaaataagttgaaaaccagtgatttaatccagcctctctgtttgcatatgaggaaatggaattccggaaaggttaggtgatttgtccaaggttgcagactagactatttattaatagagtagggtcaggaacaaaagcctgctccttgctggtccagcgcctgttactagttacataatgaatgctacctattgctgcacagtgccaaatcattgcacttttcagattttactctaatcaaaagaaaaaaattaaagtgcacttccaaatcagtacttatatgcaagagcttcaagaaacaaactagtatttaacttggtggttacatattgactgtattttcattgagtgaggttagaagagattgagaagcgtgaaatgaagttacaaagtagaaactatatggtgaactcaaggcaaagattgtccatagtaaaagaagacaaaataagaatgaaagagacaaaagaattgccaatgagttgtaatcttaaaagaaagatatatttaataaaataggattgattgttttgaatgtgggctgagaagtcctgccatcttccattgactctgctcacaggccttgtttgtgaactggcttccatggatagcattactctcctgacagctgcagctccaaattcagcatgaaaaggctggcaattctaagaggaagggagggtttaggccacttttaattctactttgtcattgcaagtttcttgcattgtttggcatttgttggtcttccttactggatttcaaaactagaacactttttcctagccttggaaccaaccacgaaaataaccacctcttaccctcatgaagaacactttaagtttttctcttttaaaaatgaagtctggaatatctccaaacatcttgtcactcacgccttcatttaaatgtcaccctctcaaccacaaggaaactaaaattgccccctacttgctactccctgttttattttctagtagaacatactacagttggagatcatctcatccatgtcttttattcttgtctcttatttgcctctgcttgactgtaagctcatggaaagtaagggaccttcaccaactagcaaagtgcttaggacctagtaagaacctggtcaattctaactgagtgaatgactgaattcctgtgagaagtcaacatgaaaattcctaggtcattagtttagttattggaactccaacactgtattggaaaagtgtcatggaaaggatagttagtggattaaggttttttataagaggaagagggaaagaaaggcattgtctttacttcaggcatttcaatggccatgatggagcctaaatattgtatgttgcattttgttttggttttgtgtgcacaagagctttgccagtggaatgaacgggttaagaaatgtgagttttcttttcgtcctgctatagagacttaaggaattgccctgtgtgagttccttgagggcagagaaaaatacaaatccatgaatacctgaaagccctgatttggcccctaagcaatctatgcatgtaacaacattgcatttgtaccctgtacatttataaacattttaagaaaagtataagagaaacacaaattttggttactcctctctgaaaactgctctgatgtcgcttggccgggggaattaagacctcttcctgtggcctgtggccactatgtgctcccggctctccaggctcatccagggccactgtgcctggggtcacagggttccaggatgtcaaccttctttcagcttctctgactcctcaagcatttttttttttttttttttttttttttggtttccaagacccaaacgcatgtctctcttcttggcacactcttcccaacttttttcctggctaattgctagttatttagtttgagattaaatgtcactccctcggcctggcgcggtggctcacgcctgtaatcccagcactttcggacgccgaggcaggtggaccacgaggtcaagagatcgagaccatcctggccaacatggtgaaaccccgtctctattaaaaatacaaaaaaatttagccaggcgtggtggcatgtgcctgaagtcccagttactcgggaggctgaggcaggggaattgcttgaggaggatattgcagtgagctggatcgcacctctgcactccagcctggagacaaagtgtgacaccatctcaaaaaaaaaaaaaaaaaaaaaagtcactcactcacagagggcttctcagatactcccctgccccctcatttaagttgcaccgcttgttgtattctcttataagccccattctttttcttcttggcattgatcaaattaacagctttattttattttagcattgtgagtgtatatgtgtgtttaatgtctgcttcctgactaaactgtaccctgcaggaaggcaaaactgtgtctgtgttgctcattgttaaaccttcagcactgaactcagtgcctcgaacataggagattccaactcaatatttactgcgtgaaggaatgaatgaatctttatgtccctcgtgcctaacataaagtctgccatatacaatggactaaaaaatagtattcagctaaaactgagttacggagaagatgaagtattaattgtattttttacagagaaacaatggtcagtgtatcaaaaatagagaccctgctctcagatatataacatagaactctcttcattcatttgccttcattttagttaacagaatctgttcatctaagtagagcagagaaaaacttcataattgctgtgtctgtgttattccaaaacatttaaacaaaaggtgaataactgaggtattcttccctgtggtacatacttgatgtgggcattttaaaagattgatcaaatctcctttcagctggatatttgagtaggcacaaccattacagaattttcctctagggacttactttagctcttaaactatgtaaactgaacaagcaaactcaagtggatcattatctatagaagtatagaattccatctccctttggcaaaccattcaaacccagaagtgtgttttacacattctgacagaagcatctgtaataaccaactctaacctcctttcttaccactttagcacccaaaagtataagaaaagaggacatgttaaggcttgttctatttattagaaaatatataaagagttcttggcttaagaactcttctggctatcagctccctgatgtgaaaaaagtaaatagcaaggggtagcatggagtcttactcccgtgtgacagacagcttaagaaagacaattggacatcatgtgactacatgattcaagctaaagtccagacacatcttttccataggccaattgaacattttctctgtaatttccacaataaccatttgcaccagcatgaatggagagggtctgagttcttctgggtgagtaaagggtgtgtcagttatctgtcctctgtcaccaggatttagaggcaggctcatagtgactcttgtaaagttgaggttcgcctgtggaggctgcaaaaaagagggaggaagagagagtgaggttcctcttggctctgtgccagggatgtgattagaggaccctgggagggccttcatcctacgaggggttggaagtggaaatggatgtgtgtggatgacctggtaacgtgtcacagccccttccaccccatagtagtcagggatttaatgcctcaacaaggcaggtctctgaaggagactgacttttctctctctctctgaatgatactgcctgagagaaatactcacttcctgctttgttttcaacaagtatggacttccttacacaaaaagaatcttttttgcttttgtccccccatttcactggaaatctatccactgggcaccactgttggtcggcttcctttcatagattcctttatgtttcaaattttaaaaagacaataatagcaacaaagtgaaatatggatttaagctaggaaaagcagagaactgaaacttttttcctgcaatcatacttcccagcttcttcagcaagatctgcttggctgggaacatgccttctgagaactttacatttctaaactgctgctaaattgctccatgcatttattcctcaaactctcagggaagatagcactggctttcagtctcataccaaccattcttaaggtaatggaccaaaagtcatttccacttgaaatataatccttctaaatgaatcatgcaacatggtttttacctccattttttcagaataactctaagatgatgatcctctggccatattttaaaaatttctcttatttgttttaattttcttccattttttctttaattttgtatccagacactgccttctctaagaggaatgacatttttgcgggttatcatgatatatttttagcccatttgccttgacccatagcttacaacagttaaagaacactaacatataaacatagagttttgcccaaggccattagctttgcatgttaacaagtgggcagaaggaaggctgggcatgagagagacatgctgtccttctggtgagatcatcaatcccattcttgtaaccttcagatcattgcatttgttcagaatcgtctgcagaggaaaacatctcaaagttgggaggttgttgaagagtcagaaacaaatgggtcctgggtaatttttcaaaacaggctttttgtcaattgtcagtcagctgtttaatattgtcaattgtcactcagctgtttaatattgtgctttgttataaggataggcactgtggtctcagcgttcttaagcttttacatttccgttatttggttttacttctgcattagtagagtagatgtagagtagatgccacctctaggaactctaccagcagcagcatcttagactagaagctccctctctaggactataatctctgtagcctccacttctcccaccccttatttcttctgagcctacttggtctttgatacttactataatactttctattctcttatcataaacagttttctgatttcattttcctctggtttcatactaagccccataatcagtcactgcaagattaccttctagaatttctgtgccctcaagttttctccatatctagagagtcagtcatctgccttgagccacatccactgtctactttcttcacttccatccccaggctgcccagcactgatgaaaacaaaacaaaaacaaacaagcaaacaaaaacaaaaacaaaaaactgactaggatctcaatctggtttgcaaatccatgcttctctttcttgacttctttagacatcaacagaattgacgcctcctcttgacctgggacacccctcctccttggtgctttcttctacctccccctgcttctctgtatgtcttttgcaggctcatctttctcttaggctgtcttcccccatctctcctctccctctgtgcactcaggcagtctcccttgtcaacccccaaaactgcttctccagaccccagtgtttctctgagctccaggtccacaattctctaaggtccatgtggatgtccctcaccatttcaaacttctcttccacagggagtccctggttttcactaccatagcatattaaaataccatgcatttcccttcataccactaattacaactttgtttcttttttttaaattttatgttttaaaaattatcttctgcccacatatattgtaagctccttttgagaaagacacattgctgtcctggtcattactatattcttatcaactagcaggggccgtggtcggggcttgtgttagtccattttgtgctgctataaaggaatacctgatgccaggtaatttataaagaaaataggttttatttggctgagggttttgcaaactgtacaagaagcatggcgccagcatctacttctggtgaggcctgaagcagcttttactcatggtggaaggcaaagagagagcaggcgtttcacacagcaaaggagagagcaagagagatgccaggctccttaaacgacctgctctcccataaactgaaagagcaagaactcactcattacggtaggatggcaccaaaacagttgtgagggatccaccccgaacacctcccaccatgccccacctccaacactgggatcaaatttcaatgtgagatttggagggaacacacatctaccctttatcagtgctcaataagctcgctgaatgtagaacagtgatataaggcaggggtgggccaagtataggcgacaggacaaatttggcctgctactgcttttgtaaataaagttttatttatttacaaaataaataaataaatacagtcataatcattggttacattttgttcaaagctgcttttgcattaaaacatcagagttgagtagctgccacagagactgtaatggccccacaaagcctaaaatagttaccccgtggtcttttacagaaaaagtctgatataaaggacagtctcacagcacagaggaaaagcatataacccaaaggaggaaagagtagagcatagtggactgcagagaagtttccctggacccaatctgtgccttgaaagatgagaaggacacctccaaaggcaggatgggggtgaggtggggtgggcggtggtgatccaagcagacagcacgggcaagtgttctggaaaacttgcctttgttcacaagtatcctgcagtataaattgcaaggtgggcagtaagaaatggacttgaagagattgaacaagggccagaaacccaaggacattgctaaggagtttgtgccttagcccatccagggccctagcagccttgactgatgcttctgaggtcctggaggctccaggctcaggctaccttcccatattctctgaaaataatatcacatttgtttagtaaaaaaattgtttactaaaaaattaacctctcagaatttctgcattcacatttatttcttctcatatcctcgagttagaaaaaggtatttctctcctgtgatgatattgattctgcactcatctattttcattactgtctccttccctccctccctcagtccctcccttagtctatctcactctaccatcttttcctttggaccttctgacattcaacatcttggtcgctcctatccagccacacctctgaccattcaaccatttgtcctcttgattggttccaccttgtcctatcacgctggatatgctgttgctcccaaattgcctccctctgccagtttcttgccccttcctccttctgtctctccctctctctttcaatctttctctccctcagtctctctttctctttccctctctctcaatctttctcttcctcagtctctctcccattctctttctctttctctcaatctctctcttcctctctctcttatcctctctttctctcaatccctctctccctctttctctctctcaatctgtttctctgttaatctctctttctctctccttctttctgtctctgtctctgtctgcctctctctctctctctctcttccctagtgagctcacttgctttcccagtttcagtgatttctattcagatatctccaaaatttgtatttccggatattttatgctttcatggaggccgtgtaaattggtataacctttttggaaggcgttttggcaatacttagtaaaaggttaaatgtttacaccccttgattctgctattgtatgtgtaaggattttttcctgcatacttttgtaagtgtagaaaatatatgtataggaataattgcacattgtttgttgtagctgaaaattacaaataatataaatgcctataatcagagcagttaaatacatatgaacacagtgaaataccaggcactcatttaaaagatgaggtatattttaacaagcctatttgaaaagatacccaatcttagcaagtgaaaaaaaaactcatcaaattgatatatttagcgctgtccctctctcaagtttcagacccacattttcaattttctgttgtcatcttgacttagtctcgtgaaattttaaactaatcatttttaagggaagatattttcttcccttaaagatgaaattcagacaaacctctgaatttccctctttctgctaatttcttgctttcttttatcatctttccatccatcctaacatacagttccagaggagtctttaaatccttccttattgcctaacaccgaggatcatttgctgaaatcttgttgatttttccctcagatcaacaaaggattttcagaatagccctgatttctctttatcaccacggtgctgtctcacgtcttctctccccctcctcctacctgccgtctcttccagactcgtctctctcccccaatctcctttgcgcactgatgccaaattagtcacaacaaaagtgtttacgtgatcgtgtcacccactggtaagctcttaatggtcttcccttacacattatctcccatttcatctcaggagccttttattaaccactcttcacagtctgactcagccctctttgccagtttctctctttacaaatagcaaagtctatgagctagattactcaatattccctgaataggtcttctcttctcccacctcttggcctttccagtaccattcaatcttcctggaaattcctgaaatttctttcctcctcactcagtcaatgttttgagacccacatcaaatgctacatactatttgttcctttactgatcatgccagttggaaatgattcgaatctgtaaagcagggtgctatggaatgacatttcttatagccctttggtcatttgggagcaatgtctaacataatatcctccaggtccatccatgttgttgcaagcgacaggatttccttcttgttaaagggtgagtagcattccattgtacatatattccatattttatttttttttgctcatctgttgatggtcacccaggttgattccatatcttggctattgtgaataatgctacagtgaacttgggagtgcagatatctcttcaacatattgatttcatctcctttggatatatacccagtagtgggattattggatcaaatggtaattatatttctaattttgggcagggtcctctgtagtagctccataatggttgtagtaatttacatatccaaccaagcacgccagggttcacttttcctcatgtcctcgccgacaagcctgatattcttatttgcctcttagcgcttcagcctttccctcgtgacttaacggtgactcccttgagactacttgaaataataagtttggatggcaaggaaatacccttctgctgtcaccctttgccataagactgagttactttgtaaacaaagaagatttacttggtcttccatgcccaagacccttttacttttcatcgcttaatatttcatggccaaaaactgttggttcttccaatcttgtaaggccatttatctttgatcttgctccattcccttccatttttgcttgagaatcattcagttcttgcctgatctcacgtctttctcgcaacaccttactaatgactgccagagtgtccactacacactatcggtctcatttgaccacttccccaggcatgtagcctacctgccaagttctttcacagcagatattttgcagtgttgtaagagggctccctagcttgctatgttttcttactacctggcattaggaagtaaacatttttcatggcagtattcacttctagtaccaatttcttttttaatctacatgggctaactgctgtatcaaacagccatcaaatcccaatgttaattgcaacttacagtacgttgtgatgtttctgtctgtatactcattcagacacacagagtttaagtaatttgttcaagatcacaaagttagtaaatggtggcatcaagatttgaacccaggcagctggactcaagagtctaaacaactttcattttaaaattttcatctttcaagatatatcacttacaatttccatcttcatcactttcttccatacttcagagctgcatatgtaaacctcttgatcatataaatatttatggagtctcagcattttgagcacatgctgagagattttgtagcattgaagataaagaagctctttcaatacatctaatcttgccactattgattttgaacagcatcttaatttgttacctttttaaaaccatattgtacttttcttcaggacagctaaattaaatgtcttatgttgatcccctgggttttctcagtttccatttatcagtttccttttatataaagagatgctaatgggtaaccttacattttgtaaggcatatttttgaagatatacaagtgaaggtttgatctgtacaccctcgttagagctctttattttacatgtggaggaagagatgccttagggcttctgaaaaacaggcttttatttttatagaggagaaacttccagaacatgccatgagcaaatgctctgtcaagtctggttctttcccccattacttaagtgcaaatggaccacatttgaagaagataagtagcagaacaaggctccccacaaggggattttgaggtgctctgaaaaccagactgacataatccatggaggagttcatcactgcaggctgtcacgtctcacagtgggagtcataggctggtctgcttgataaactactcctgatctatgactggagctgtgtgcttcctttaaaaataaatcttgtttttccatgccccacgtgcttctcagcctcaggagcacctcatggatttagactaatcttgtcttttacagtcatgttacttccagattcctaggaatcaccccatttctgatgccgttgatccatccatacccactgaaattgagctaaatgctctagtctgatttgccccttgaagttagtatagaatattttggctagactttgaaaatgaagccctgaccacaatgcataatgacctcagtagacactgaagagttcctttgcatcaggcaagtgacaagtatctatctcatcttcaaagtccacatagatatgtgccagattgtaggttgacaaatcactttttcactagctcacgtggcaagccttttcaccttgtaataatgctagtgagagacccataggtaccacataattggccagtcattgagattcaagcaacatttggataatttagcaaaactatcatcagaatcatcaaagtacataatttttatttattatgcaaatagtggattcactaaagtgcttagaccaattaagttgctcccattgaaaaacagggtgattttattcttaagaatatatcaggataaacttcttgtagcctctaaacagtactgcttagaaaagtgcagcttcactgcattgcatatccccccagaagccctcaaagttcagatgtacaccacaaaaacatgaagcacatgtgtttgcatggaaggtaggctctggggtcttcctatcataatatgtctatgattaatagtcaacatatgccccctccacattccctaaaggaacatacacatgcatacacacacacacacacacacacacacacacacacgtgagaactgaattgagagtttggggtatacaccatccctgagggcacagtctacagctcctaatgtgtgctgtagagcaagcattatattgttgacaggtaataattcctggttaggaataacaggataccagtgagaagaggctgagaaaaatacactcttgctggaagagtcaagaacgagctcttcgtgggaaactatgggagacgattgaaaaaggacaagaagaaaggagaattgttaagtctccactttctcagtttctgaactgaacttttgctcacagcaggtgaacacaggctccctcccacactgagacttcctcccctgccggtgtgcagtctgttaagtaaacagagacgttatactgagaaaggaacatttctctattttggctatgagttgttatttttaaagattcatcctccaaacattttcccctatccttgtttattttttcactagaaagaagatgaactgcttaaaaaaaaaattcaactccatgacaagaaaaacccacttctagtatgttctccccactcaatgccaatggagcctttggtgtgagcactctgccagccacacattgggcagcatacctcttgaaattcctgctgtgcttctatagagcttccatgcatccagattttcaaagtcaaagcaaaatgcgcatggcagtttttttctgactccttcaagttaaaaggccaacctctcccttgacatatccatgtatttatcagtatatctataggtaatacttaaaggtgatccttactgtgtgccacactccattctaagcactttacataaaaaacctcatttcactttatttgggaataggatgacaatttcttcaatattgagatgggttgaatctggggagactgatgttagatgcaaaaagctttctttctagaacttttcctgtgtcttgcacctggctttctccctgtcttgttcccattctagatctctttactgacagtgcccatggctttcttcttggtactctagtgttgagcataagaactagtatgtaataggctctcagtaaatcttgttgaatgaattaaagtagagcaagaattaaagacagagaagaagatcttcttgttggagttctttcttttggttgataagcaatgtgatttgacgtaacaatcttgagtcctaatcccctcatttggaaaatggaaataataatgctaatcttagaggtcacttctaagaagtatatgaatatatcagaagtaatcaacatttttaagtcaaagaaaagaacgtctgtgaaaaagaaaactaatgagctagttgaaaaaatattaattggatctttttctcataccttacgccaaaataaatccccaaaaatggttgcacaacattgtgaatatactgaaatccattgaatcacactctttaaatgggcaaatgttatgttatgtgattatctttcaataaaattgttataaaaatgaataaaccccagaagatcaaaaatttaaacataaaagcatggaagtatactagaaggaaatataagataattttatatgttatgttgtatatatttatatgtaaaatttttttatttatttttctttgcttttaaaagcaagacataatgttctagaggaataaatgaaacgttcgataaatttaattctctattaaatgttttgcagaagaaaataccaggaacaacatcagaagaaaaaacaaaaaaccataagaaaaacaattaaaaatacatatgacaaatggcttattactataatatttaaagaactcttaaaaatctatgtgaaaatgacaaataacagaaaaatacgtgcaaaggacaagagcaggcagtttagagaaagcctataccaatatattctcttatcaacagtctattgtacaagctatttgaaagcaatgtttgaactatcaaaatttaaaatacataagcccttttatctagcaattctacttccaagaatttattctatagctatctgtacacatatccaaagacataaacataaggatagtcattgaatgaaatgtttttaacaacaaaatacttgaaagcaaagaaatgtcacccaagaaagaagtgattgaagaaagtttagcattcagttcagtgaagacatattgagctgtcaaaaaaagttgatggagaactccaaggtctattaactaaaaacaaaacaaggtgctaaacaatatgtttagtgttcatattttaattgtttatatatttcacaaatatatatttgtgcatgcagaaaatattttaacttctttctaaccccgtcaaacacatcatgccaaaattcaacttgtgataaagaaaaaaataaatgaattcctttcgtgtgtagtatctcatttaaattcttcaacaacccaataaaaaagatacagacacatgtttttaagtactacatgttatgcacctttggtttgcttatttaatagttgcaactactaatgttaaattcttgatgccaaggttaaaagcctgaacttctaaaaatatcaagatctgacatttttctgttttcacagattaatctgccatctcctgacctccaacacactgctctatgttctttcatgctgctcctcctcccatgtttaggaccctcttccaaggaggcattcacatctctgcttgatgaaaccctacattatcttaaagcgtccactcgaatgccacctacttatataccatctcctgcaataccaatgggctcagcccaaccatagcccatagttattgtagttgttcttgtacttcaaaagcactacaaaacacaaccatcaggacttgttacattatttgaaggctatgagcatcttcagccgaggccctgtttttattcccagaactaccacattgtttagaatatagtagcagatcaatatacgtgtattagataaatcgtttacccagatcttgatcattttcaattacccataggttgaagaactccatatttaacatggcagacttgaggactgaactacctacctcttctaagaagttgaaatgagaatgttttattgatgggaaattatttttttgttttgccttctagaattcaaatgaatgttcatattccatgaagacaatggctgatagttttttgttaaagatttagaaccagtggatttttatgaatgtgaaccctttcatgtcttgtggaagattttctgttttttaatctttttatttatttatttatttttgctatgttttcataggaaccagggaaaatgtgtagagggcatggtggagatcttcgacatgctgctggctacatcatctcggttccgcatgatgaatctgcagggagaggagtttgtgtgcctcaaatctattattttgcttaattctggtgagttgataacacaagataactcaatgctggatgaaatgtttatttgtagttttcaaccagatacgatctacccactccaaaggcataatgtcataaatagaaagaaactactgacacacgttttaaaataacctaccaacattgcagattccttataaaggtagaaccatgctagccaaatagacacatgaaaaattgtaatttggcattgaatcaaatggcctttgagctaaaatttttgtatgctttcacagataggatgtttttattcaaatggtacatgtatatagacatatgttagttgatagttatattatgtctgaaaataagtagaccaagtaattctgttaagaaattgtgaccaattccaggctccagatagtaaagaaagagggttatttgagacagaccatgtttctggtcaaaactgactagctaaaaatatagttggcttagagatagaaaaacctgtttctaaaacagaagaatgtggaatgcaataaattgtccagctgaaagaacattttccatttgctctatgaagtctgattctactgccccttcgtatttatttgtttgagaaagcttagctaagagcaacatctgttttttgtttttgtttttgtttttgttttgtttttgttttcaatgtagtgaggctggctgttgtataaagagttactctatgtcaccaagatggaaactatggttcagcctgaattagtgccctgactcctcctagcctcttggtatttggatctaagctctagctctacagcctctgggacctaaagctcacattgggtatcagcggtacagcagctccccttaagctccacctttccccctggctctaaccccactttgtgcctcatccctcattctcacatagaaatcatagctatttcgaatctctgggcctgacttagtttcttatgccattagacatagtctcaaattcctcaatagctgaattgcagcttgtattgatcacatacatagagaatccgcacttccttctctttccacgtgtttttgtctctttctgatgagtgctgatcccttcccgcttcccctaacaattttttacttttcttccccaccactgctaggaacctgtgttgcttaatggaatcagcccttccttctcttttcttgtgtttttgtctctttctgatgaatgccaatcccttcccacctcccatgacaattttccacttctcttccccaccaccactagtaacctgtgttgcctaatggttatcacagtaatcattctcacttatcaactaataaatggaaatctgtactattacactaggcaaggactgaattacagaatgaagtcccatgataaatgatgtgatccacactaaggaagtgattaccactccattcaggtttctgtttccactcacgtgcattgtgcttttcatttcagtcgtttgtcctgtacattgtagggtccagatcccacaatggctctttattggatgagagttctgggagcagtgccactcagctacatggtgccaggtcctgaacctgtgccttcttcggtggagggctggcacgtgctgacagctttcatgtgggcaatctgggaacttcagagaaggcaggcctattaagtgttaagactccccaccccgaacttttactgagaaaaagtaccccagacaggaagtaaaattagccagagttgtatgatccacacagtggatgctctgatctcagtaataaaaaatatttcctccagatccatatagacttttcctgcattattgttttgtttctgttcctatggcagagtgagtttttaaaactattatgcaagaaatatcaggatttttgccaccaaaaagttggattcatagacccagggtttttacaacccagggggaaaaaactttcagccctcacaagaaagtattttattaaagactggcacccaaacctcaagactatatttctcactgcaggatttggcccctgtctgcctccttctcagactagttaaactttcatactccatccttgttccttcgcttctttcttaggatcttctgtgcacttctttcttaggatcttcttggcacttctttgctcttgaagggcagaaacgctattgtagaaattcaaggcactgtatgctgacatagtttatagttgtctttttcatgagataacacagcggctggcagctcctcttttctatcaaggacagtactgctggctcaggagagcagtaagcaaacagaagctgtctctcaaccctgtacaaagcgaaaccactcttttccctacaaaagtgagctgtgccccagaaaagcggatctgctgctgagcagggctcctcatgtctcctattgttcctgaaaaacagcatcaaagagggcaagactgacacacaatgttgtagcattaggagcctttttcagaataaaaaagcaatcagtcatatgaagcatgtggtcataccacaatcaacaatttttctccacaactggagatatggatttttctaaaagtccaactgattcatggccctgatacggggcagctctacctctcatgagaccaatgaccaagtgactctgactccaggaatctctgacagaagccaagctggaaacggctcaggaaacctgagctagaagatgcctttctgacacctgggaaacaaaacctcagtgtatggaggaacccaaggttttgtgttgagccccagtcgccaaggtctgaggaggctgggtttatattggccccgattttgtggccgaggcacaaggggaattgaaaggttgttgtgaggacctgctcggaatgtctttctggaagtttggagagggtctctcaaatgccaaaatttccatgggaagccattttcacagctgcttgggagtgggagatattcgtcatcatttctgccccatttagaataatttattactttgcttgcaaaaacccggaatcatccataggacacacgttgtttgtttttccactccacaccaaaggacagaggcattcctggttaatccaagatgccaacttcaagacattctgagaactagctggacagagctgaagtgtagggcaaatcagaacagaagtgatgggcccagggcaaaagcccgtgaagcagcagctgcggaggaaggatgggagctggagctgcaaagggggccatggtggagactctgggcctgcccacagtatcccctctgcccaatgggaattcagttttcctgcatatcattcaattatttctcatttttctaggcctagctcaccttattcgggaagttttgcgactaccccagtccataatgaatttcctctctagactatttcaattcttacagtcactaccacacagtctaggatttggttagttggttgatttcattcatttattcaataattcaatgtttattgagttcctactatggactttgtgccaggtatacaaaactgaatgttactgttgtgtggggtttttttctttgcatttttaaagttaacctggatttttctctcactctttatgcatgtatttcctaatctccctataaactatttgtatttttttggattcctcacagtctatttagcctgtggactgtcaacagatgttacatcattcagtcatttaatagatgcttatttgctagacatggccaggaggacctggaaagtcctcatttttcccatctgttcttaccattctgaaatgtatcatgctcttcagtgctccacagatctagatgatatcaaattattaaatggaaaaagcaagacccatctccttgggttattgtggataagggggaaattgtgtaggaagtgtctattgcagttcatggaccattgtaggcccttagtcaacaacagctatcatcatcactgatgagaatctctggcttaaacggagtaggttcatgccttttttcagtgtaatgaagtgttttagtttaaaggcctttagcaaggcttacaataaaaaaaagtggggactccagggtaacaccaacaatagagacgaccatggctgttatcctgagactattaattatgccacgtaattagatttagagaaaacttagagcaacatttatcttgtggataataattgattgtgattgggacttaccgttgagagaccctgatgaaaactctatggtgaattgctgtggagtcacatgggttcatgcatcattcatcagtgggccctggttttagcctcataacccctgagaatccacctctatcagaaaaccaccctttcagtgaaagttcctcaaggctcagaaaaattcatatgtcaaagctttatatgtaaaaacctatactctctaataaatgtttggtttggccttcacattcaatttaataattatttctacctcttttctaaaccgctcttaaccacagttctatatatttaattctgaagagcctcatgcacctccctccctggtaactttatctacttctctccctggagaaccagccagaccatgattccagccctctgtcctctcttcaaccgtaggtcctctttttctctcctgactcctcaaaccttctccagttacccggatgccttctgtgtgctgctggcttctgcatcactgttcacagggccacttgttcccctggaaatgtcttatgctcttgaaatgctatagccttgttcacctgttcatccaaaactgatcctcagacaacatttctctttcaattggtggaataataaagaggaatatgggtcaaaattcatagacatttaaatacccaaggtgcaaagttaagagaaaacaagataggagaaagaattatggcaacatctctaaaatgtgtactttagtgtttagcaaaaaagggactatggaatgtcaaacaggaacatatatgttaaacataaacatgaagcagtgccagctgctgtctgccatatagtcatgctttgttaatgtggcacatcttgccatgatggtgccctcatgaaacgaaggatgctgaagcagatgccattctgtttgctttgatcagaagccactctctggtcaaggaagtatttgtttcatgcttaattataacaagttctcatcacaaagattattttctttctccagatctggattgtttgcactcactttatattattagacaattactcagattgtttatgtttttatgtttagaaataagacagtgattcagagagtccctgtatttagatgaaagaacattttttaaacatattgactgtaaacactgaaaatcattaattctcaacagttgaaggtttctgacaggaacggcccttggaaattgtaaatgggcacattgtcaggtatgcccattgttgtcacattggagaagattggattctgttctctctggagtcctttgtaatgccaagcttcctctccagggagctggcttattgtcattattttgagataaatggcacttcatagtattaagtggttcattgtctcttctctggctgactgtattctgtaggcagccactcaactttggagcctttctctgctaccaacttttggtgttgccttaagcaagcctcatggctcctgttagtttcctgacaacatggtatagcatggactttgtcatcagagaggactgaattcaggagaagcaactctgccacttccttggcggaagggggatgactgatgtcctttgataagctgcttccctgagcctaataaaaaaatagaaataatgatacttaaactcatggaattgttgtgacaattgaaagaatgaccagttagtaaagcatcttgcaccatgactagcacacagtagatgcacatgagtgttactaagctttagttatgccctccaaatacaaagccttagttttgtcactatgaaagaaattactctgttcttcttagcaggtaataaataaatccctgcctggaaattctgcaggagaatttcacccctgcgctttcaggttaaaagattgcattcccatgatgaagatgttctgtgaatagaatcatctcaagtcccaaatggtgtggatttgctcctgcatcttgttgcagagattctcttggagcttctgagaactggggaaaccaacaaaatgcctgtagcctggggaaaatgtagggagttttagcatgaatttgtgggaggtgagaaaaggcagcaggtgtcgaaagacgggaaatccttgcactgttctagatgttaggagccattttccattcacattcagcacctcaggaggagaagctgcctatcactttgtgtcctcaagagaaccaacaaaggagaatgccatctcccagatactcaatttgattaccattttatcctaccttctctagggtccagacattatgtaaattggcattaagtttgaataatgtatggacccagtttaaaaggaaaaaatgctttgggaggctgaggcaggtgcattgcctgaggtcaggagttccagaacagcctggccaacacagtgaaaccccatctctactaaaaatacaaaaagttagctgggcacggtggcgggcacctgtaatcccagctactcaggaggctaatgcaggagaatcacttgaacctgggaggcagaggttgcagtgagccaagatcgtgccattgcactccagcctgggtgatgagagcaaaactccatctcaaaaaatttttaaaacaaaaggaaaaaatgctcccctgattcccgcagtgctgacttaaaatgttcttagtatgccaatgttgcttaaatatgaatgactgtagcttctacttaaattggcaaccgcaccaaatataaactgcaaatgtttatagctcttatggaagtataaaagcaaaacaaattcttaaattaaatacaaactaagagggaaactgataataacaatgttttgtgtaattaagttgctgtttgcaacatgcctggggcagactcctggcctctttgcatctgacatgagaggctaccaaggatgtggccacaactgggctctcccagcacttgcttgcgctcagaactgtgccaaaacctttgctcgcccagtgttctgcaacgtccatcatttggatttggcaggaacacatcatttatgcattttgtttgcttctgtatttagttgagatacttaaaatataactgctagattctaaggcattcataagcatctgtgaaaaatgtgttacttaggaaacagttcagggttccatggattatctagattggtgagtcttaagactgaccacacaattcatctgggggtgtggaggaggggagctttgagaaaaatctctgtatgagcacccacacccagagattcctatgcaattatcccagagtggtgccttaatatcaacatttgtttaaaaccatcccccaagactaaaatttgtgaccgggatttagaaccattgacttaattgatgcagaacactctgatattaatgtcttcatgtcttttggaatgtcattaagacaaaagcataaaattttaaaattcttaaagacaatttaaagacctatgagaatccatctttaattctcaggagcgtgtggaacctagtttgaaaactactggcatcgacaattgaatttccactaaaataaaatagctctctagtatattacaaaactacccattctgcaaactgcaggggagctactgataatgcttggaactgtgccaggcactgcctgcataaaaatgagtaaggtccacttcctccatggactgggttgggtaggaggcaaagataattaaccaattattttaatattatgagttcagggttgtaatgaaagtaagtattgagtgctgcagagacccagcaaaggagtccttagctgagaactgatcctttgctgagtgacgaggacattattgaaccgccaggcttgatggcatgttgcatggtaacagaccagtacaccaaacagcaggagctgtagcagagaaagagtttaataattgtgtggcagccaaataaggagacagaaggaaaccttaaatccacctcttgaaaaagtctgggactaggctttttaagagaattctggcaagaaggaggctgaggagctgggggtaactgattggttaggacataggagaggagacaataaggatatagaaactccattcttgcactgggtcagttcctcggagggggtcctcactctggctggcagcagtgaacccattggaatgcaggatctgaaaaatatctcaaaatggcaaacttgaggggttttttttagcatcaaagatgttatctatagaagttaggacattgtgacaggggctacgtgactttgaagtgttaagtggctgtcagaaagtgagctattgcagcggtccccaacctttttggtaccagggaccagcttcatgaaagaaaatttttccacagatggggtggtgtagggtggggtgggggatagcttcgggatgaaactgatccacctcagatcatcaggcattagttagattctcatgaggggcacacagcccagatccctcacatgggcagttcacagtagggttcacagccctatgaggttctaatgccactgctgatctgacaggtggcagagctcaggcagtaatgcttccttgcccaccactcacctcttgctgtgtggctcagttcctgacagattacggactggtaccagtttgcaacccaggcagctggggacctctgggctgtagggtaggctggttaatgcttagctgtgtttctattcaaagcttatgcttttgtttaaaacctagtaatttggttttgttaattttatgaagatgatttcaaggatgagtaggattagctggagtcagaaggacacaagggaatttctggcaacaacattaaactaccagtgaatgtctcatcaagtcactggacctctaattctaagcagtactgtcaaccttataggttatgatgtataagatagtgttgtgatgtataagatagtgcaaaaacctaagttaatatcaccatttctgtagtactctctatttcaaaggaaaaaatcttcagcagtctaatatcctaccaaaattttgaagtcaagacctccctacactaatcaaagaactagaggtgcaatcaggccatatatttggaaaggccataggtgccctccctctgtccttgttcccagcatactaaactatagtctaaaagactttaaaacttgaactgaagaaaaccttaaggaaacaacaacaaaattccatttatttcctgagcccaaaagtagaataattgttttttaatgaatttttctttccctgtaagacatactatgaattgttcaatgggtattcaaagcatatgtaatagaatatgtatgctttcctgaaaaattgaaatggaacatcaaactgttctgtaaagttttgagtctagaccaaactcacagcacttagccagaatatgtacatctgcatctgccactcatggccccatcgctccctccaactgcttctcttgggctgaaggatggaaaagcaaactccctgcgttgagttccatcttgccctgcatggcctcccccatggggtcattgagctccccaccagcttccacctcttccagcactttccgccagagggcccgtggctgcttttgcagactgaaattgattgtggttgattcagctccatttcctctgagtttttactttagatgtgctttttaggttgcatttttcttctggcatataagaaagacagcaatattccatggaacagagtgatgtctgtggctttgtcaaccgttgtttgttagcttgatcaccatttattgagtgtttactactttccaggcattgtgctaagtggtagaaatacaaagttgcctttacttgattcatctgtaaaatagagagagtagtagttcctacagtgtggtttatgtgaggcatagggactgctccctgaaacctagggacaactccctagcagcgacccagtgctcatatcaatagtggtaacaattaggaaggcagctcctacctcaaagacctcatgatctgatggtaaagacagatataacaagaaaattattctttttaaatataaaattgtgatataaaaatagttttcactaaattggatttttatgaaatttacagaaacaaaataataaattaaggaaatataaaaccacctgacattagccaaccatgttgatgttctgattatgttactgcaaaggagtgtagggttaagaacgagggactttgattccaagatcaaatccctttctgctatttcttagctgtctgactttgggcaagttgcttaaaccctttgtgcttctgtgtgcttgcccatgagatggagattataatagcgtctacctcatagggctatttttaatacaagttagctcttagaacaatacctacttaaactaacaatttgtattaggtactgttttattctccatccgtactgtgtatgcatatattcatatttatatttacatattctaattaggattatatacatgtactttctttaaaaataagattttaaataactatataatcagtcatgatgatacaacatgatttattcaacaaatctgatgctgttaaacacgtaagtgatttctctttcaggattataaataacatttgttttgcatttttttcatacatcttttgctcacttttcattgttactttgtatatgttgctagaaattgatttgctggtgaaaagggtataaacatttttaaggctcttgctacatattgcctgctcttcatacatattgcctactgccccaggaaactatcaattacacttttaccaagagtgtatgaaagcattcacatgaatgtaaccttatcatgcaatgcgggccatgagacagaggagagttatggagggtagacggcttccccgctgctcagccactgccctctcctctaaaagagccacagtcaggaatttctacatagatcctattataaacatctccttttgaaacaaattatcttctctcagagcattttcttcattttagtatctatataggtccttgttatgttcattttaagttttgtgacctgcactgacacaatgctgatgaactgcttattccaggcagtctgagttctcaaagcatttgcattttatgtcttatcctctgttttgggctctttgccactgatttttttttaagtgatattttaagaaagaggagggttgatttgttgtgagtgtatctctctttaaaaacttttctagggaaggacaacctcttccaaagactttgtttgctttgtgtgattggcatgtccttccctggtcagtaatgagcttgaaggaagctactggacacgggactgaacatggggttttgctatcactctagctgtgcctttctctagtgatcaaggagatgttggttcagaaagtgccctgtctaatcccactaaggcccgaaggaccaagtgctgtctactctccagattctctgcaacagaaagcagatgcttaggcttcatggtccaggttggaacaggtagttagctctgaggacagttatgcatgaatgtcaggaggggactggcaggggaacatttatttattctttaaaattggaatcaacagttatggatgaaacccagaatgcaaaattcactttcatcttgacacgcaacacatctgtcctttctccttgaatagcaagtattaatcattgagttagacaatgtaaccttcacattcagtgaaagccaaacactcagcaccttctagaaaaatcttagtgccatgctttcttagcatattgcaagtcctctgaggatgatgtgttgttcagctttgaagctgatcttttgtacttgcttatgtagctcaggctagtgataacatgccagaggcatttccaactaagaaaattattcacagaagctttaattacaaatttgttagccccacttcctgctaaaatggccagccttgaagagtttcggaaatgtgagcagccttaaggatgatagaaatattatgaaatagtaataagtaatacccatacagcaaactcctttttctttggagtatccgttcatcagccagatttccctctcaacagtccaggtgttgacgaagatcatgaaataataggaatgaaagggacttcgattttgtatttttaatagcattttcctccaccaaattacgaaagtaatgcatgaccaaggcagagaacttggaaaatacagaaaagccaccaagcaaaataatctcccaagaaatcataatttcaccacacaaaagtaaccattgtcaacattttggtgaaaatccttaattaaagagactcttaaaagatgccagttcgctgccacttcttcctttctccacaccatcctgcaccctgttttgaaatgcagaattgtttctaaatcattccaggaaaattattagttttctcaaatatctctggaggcgagtctgttggcagtcatttctagtttctcacaaaccttgaagttaggaaattatttgtgtagcttttgagcactgggccagaagtgagggatgtttgggttctagttccagctctaccacttatttaccaactggccgacctcaggcaagtccaggctagcggccccgcctcaagcccctccagatgcagcatctgcaaccccacttccttcacttcctttcgcctcagtttcccaacaatttcctagtaattgtactgaatcattgtttttcattttttacattaaaatttatttattttattttatttttaaagactttattttttagaacagatttagatttgcagcaaaactgagtggcaagtacagaaagttcccatatattccctgcccccgcacatacacagtctccctcactatcagcatccccaaccagagaggtacattggttacagctgatgaatctacatcgacacgtcattatcacccaaagtgcatagtttgcattggcgttgggcattttagggcttttgacacatgtatgcactattgtaatatacagaataatttcactgccctaaaaatcctctgtgctcctcctattcattcctccctccaccccattcctggcaactactgatctttttactgtctccacagttttgccttctccagaatgtcatatacttggaatcataaggtttgtagccttttcagattggcttctttcactcagtgatatgcatttaaggttcttccatgtctttttatggcttgatagctcatttctttttatcattgaatactactactccattgtctggattatacacactttatttatacattcacctactgaaggatgtgttggttgcatccaagttttggcaattatgaatgaagttgctgtaaacacccatgtgcaggtaattgtgttgatatgcatttttaatgcttttggataaacactcaggagcacaattgctggattgtatagtatgtttagttttgaaggaaactgccaaaccatcttcccaagtggctgtaccattttccatttccaccaacaatgagtgagagttcctgttgctccacatcctcatcagcatttggtgttgtcaatgttctggattttggccattctaacaggtgtattgtggtatctcattttgttttaattcgcattttttggataatatcacatggagcatcttttaataagcttatttgccatctgtgtgtcttctgtggtgaggtgtctgttaaactctttggtccatttttttaatcaggttgtttgcgttcttatcgttgagttttaaaagctctttgtatattttggataacagtcatttagcaggtatgtcttttgcaaatattttctcccagtctgtggcttgtcttctcattctctggagatcagtggtttttacactttcttctgctgaagccaagtattgtggaagaagccatggggtcaccagaggataggtgcacagggtagtgagggaaagttggagtgaatgggcttggtgcccccaccccgcaacatttctcttgctttaatcagagaagtttgacttcatccagattgcatatgaggactttacatgaggttcacctttttatttgttttaaaaggggtttttactctcaaaatgttttaaagaccactgaactagatgatcatcttaaggcccttttaagatttatgattctggaattctgtggctctatttttccaatgtaatataaccttcctctcgttaaggaaaaatgagataaacctgttataaacactcatgtgacattttttcaatacagttttcatccacgtagtgctcacttagaatgatagaaacaatacacctaaagaatatgcaccattcacttgcccactcatctctcaaagagaggaactttcaacactagttatctttttaaaaataatcagagagaattctcagccacttcaattctagcccaggaaaaagagggaaaatacatttgaaggtttctggctcatgtgatacatttgcaaaccagaaccaagatgatatgactctcatttattagtgactattgcaaagctttgcaggctattaagcaggctgttcaatttagggtgatatggacatgtgcatattggccaattatatatgctcagatcgtatgtcattttttttctgcattttagtctaagtgtcagataggtgtttcatgatgttttataaacacttctgttcacattaacattgttcattgatttggcaaggaatgaaggggtgtcattttcatgattttatttgtatattatgtattccacagaggatttgaaatgccttaccaaattttatgtaatgtaaaggggtaaaccaatatttgacacatcattataaattgaggataatctgaagaaaataataaatccaggagacagattatcacactgatatggtttggctctgtgtccccacccaaatttcatcttgaattttactcacataatttccatgtgttgtgggagggacccagtgggagatcatttgaatcataggagtggtttcctccatgctgttctcattgtagtgaataagtctcatgagatctgatggttttatcaggggtttccacttttatatcttcctcattttttctcttgccaccaccatgtaagaagtgcctttcgcctcccaccatgattctgaattctgaaccctccccagccatgtggaactgtaaatccaattaaacctctttttcttcccagtcttgggtatgtctttatcagcagcacgaaaatggactaatacagtaaattggtacaaggagtggggtgttgctgaaaagatagccgaaaatgtggaagcaatcttggaactggatatcagggagaggttggagcagtttggagggctcaaaaaagacaggaaaatgtgggaaagtttgaaacttcctagagacttgttgaatggccttgacaagaatactgatagtgatatgaacaataaagtccaggctgaggtggtctcagatggggatgaagaaactgttgggaagtggagcaaaggtgactcttgttatatcttagcaaagagactggtggcattttacccctgctgtagagatttgtggaatttgaacttgagagaaatgatttggggtacctggtaaaagaaatttctaagcagcaaaacattcaaaaggtgacttgggtgttgttaaaaccattctgttttaaaagagaaacagcataaaagttcagaaaatttgcagcctgatgatgcagtaggaaagaaaaacccatttttttgaggagaaattcaagctggctgcagaaatttgcataagtaacaaggagccaaatgttaatccccaagacaatggggaaaatgtctccagagcatgtcataggtcttcatggcagcccctcccatcacagacccggaagcctaggaggaaaaaaacagttttgtgggccagtcccagggtccccatgctgtgtgcagcctaggaacttggtgccctgcatctcagctgctccagctattgctaaaaggggctgaggtaccacggtttcagaggttgcaagccccaaaccttggcagctttcatgtggtgttgagcctgtgtgtacacagaagttaagaattgaggtttgggaacctccacttatatttcagaagatacgtggaaatgcctggatacccaggcaaacatttgctgcagaggtggggccctcatggagggcctctgctagggcaatgaggaagggaaatgtggggttggaacccccacacagagtccccactggggcactgcctagtggagctgtaagaggaggaccactgtcctccagaccgcagaatagtagatccactgacagcttgcaccatgtgcctggaaaagccacagacactcaacgccagcctgtgaaagcagtcagggttggaggtggtggtggctataccctataaagccacaggggcagagctgcccaagactatgggaacctacctcttgcatcagcatgacctggatgtgagacattcagtcaaaggagatattttgaagctttagaatttgactgccctggtggattttagacttgtgtgggccctgtaacccctttgttttggccaatttctcccatttggagctgctgtatttacccaatgcctaaacccgcattgtatctaagaagtaactagcttgattttgattttacaggctcataggcaaaagggacttgccttgtctcagatgagactttggactgtggacttttggttaattctgaaatgagttaagactttgggggactgttgggaaggcatgattgcttttgaaatgtgaggacatgagatttggagaggccaggggtggaatgttatggtttggctctgtgtccccacccaaatctcatcttgaattatactcccataattccaaagtgttgtgagagggacctggtgggaaacaatttgaatcatgaggccagtttcccctatactgttcttgtggtagtgagtaagtctcacgagatctcatggttttatcagggtttccgcttttgcatcttcctcattttctcttgctgctgccatgtaagaagtgcctttcacaagcataaggaagaagtatacttgctggagcagcaggctgtccttcttctgacgatatggactgcaagtgcctatgtttactttgaccaagacggcctttcttttcacagaaagccagggttcaccccttgaatttcataagacctctctttgcagtgggttagatactcttttatatttttatactctgtcaggaaaacatttttttttccatttaaaaatcagtcttttggttgcttccaagatggctgaataggaacagctctggtctgtagctcccagcgagatcgaagcagaaggcaggtgatttctgcatttccaactgaggcacctggttcatctcactgggactggttggacagtgggtgcagcccacggagggtgagccgaactggggcagggtgtcacctcacccacaaagtgcaaggggtcaagggatttccctttcctagccaagggaagctgtgacagactgtagctggagaaacagtacactcctgacaaaatactgcacttttccccacagtcttgacaactggaagaccaggagataccctcccttgcctggctcagtgggtcacacgcccatggagacttgctcactgctagcgcagcagtctgagatcaacctgcaatgctgctgcttgatgcggggaggggcgtctgccattgatgaagcttgagtagctcacagcgtaaacaaagcagcagggaagcttgaactgggcagagcccacctcagctcagcaaggcctactgcctctctagattccacctctgggggcagcacatagcagaacaaaaggcagcagacagcttccgcagacttaaacatccctgtctgacacctctgaagagggcagtggttctctcagcacagtgttcaagctccaagaaccaagagaccgccacctcaagcaggtccctgacccccatgtagcctgactgggagacacctcccagtaggggccgacagacacttcaaacaggcaggtgccctctgggacgaagcttccagaggaaggatcaggcagcaatatttgttgttctgcagcctccgctggtgatacccaggcaaacagggtctggggtggacctccagcaaactccaacaggcctgcagctgaggggcctgacggttagaaggaaaactaacaaacagaaaggaatagcatcaacatcaacaaaaaggacatccacaccaaaaccccatctgtaggtcatcaacatcaaagaccaaaggtagataaaaccacaaagatggggagaaaccagagcagaaaagtggaaaattccaaaaaccagagcgcctcttctgctccaaaggattgcagctcctcaccagcaagggaacaaaacaggatggagaatgagtttgatgagttgacagaagtaggcttcagaaggtcggtaataacaaacttctccaagctaaaggaacatgttctaacccatcgcaaggaggctaaaaaccttgaaaaaaggttagatgaatggctaactagaataaacagtgtagagaagaacttaaatgacctgatggagctgaaaaccacagcatgagaacttcgtgatgtatgcacaagcttcgatagctgatttgatcaagtggaagaaaggatatcagtgattgaagatcaaattaatgaaataaagtgagaagacaagatgagagaaaagaagagtgaaaagaaacgaacaaagcctccaagaaatatgggactatgtgaaacaaacaaatatatgtttcattggtgtactgggaagtgatggggagaatggaaccaagttagaaaacactcttcaggatattatccaggacaacttccccaacctagcaaggcaggccaacattcaaattcaggaaatacagagaacactacaaagatactcctcaagaagagcaaccccaagacacataattttcagatttaaaaagtatgaaatgaaggaaaaaatgttaagggcagccagagagaaaagtcgggttacccacaaagggaagcccatcagactaatgggatctctcagcagaaaccctacaagccagaagagagtgggggccaatattcaacattcttaaaaattcttaaaaaaagaagaattttcaacccagaatctcatatccagccaaactaagcttcataagtgaaggagaaataaaatcctttacagacaagcaaatgctgagagattttgtcaccaccaggcctgccttagaagagctcctgaaggaagcactaaacatggaaaggaacaaacagtaccagccactgcaaaaacattccaaattgtaaagaccatcgacgctatgaagaaactgcatcaattaacgggcaaaataaccagctaacatcagaatgacaggatcaaattcaaacataacaatattaaccttaaatgtaaatgggctaaatgctccaattaaaagacacagactggcaaattggataaagagtcaagactgtgctgtattcaggagacccatctcacgtgcaaaaatgcacataggctcaaaataaagggtcgaaggaaaatctactgagcaaatggaaagaaaaaaaaaagcaggggttgcaatcccagtctctgataaaacagaatttaaaccaacaaagatcaaaagagacaaagacagccacaacaagaagagctaactaccctaaatatatatgcacccagtacaggagcacccagattcataaagcaagtccttagagacctacgaagagacatagactcccacacaataataatgggagactgggagacaccccacagtcaatattaaacagatcaacaagacagaaggttaacaaggatatccaggacttgaactcagctctagaccaagtggacccaatagacatctacagaactctccacccctaatcaacagaatatacattcttctcagcaccacattgcacttattttaaaattgaccacataattggaagtaaaacactcctcagcaaatgtaaaagaacagaagtcacaacaaactgtctctcagaccacagtgcaatcaaattagaactcaggattaagaaactgactcaaatccacacagctacgtggaaactgaacaacctgctcctgaatgactactgggtaaataacaaaatgaaggcagaaataaagatgttctttgaaaccaatgagaacaaggacacaatgtaccagaatttctgggacacatttaaagcagtgtgtagagggaaatttatagcactaaatgcccacgagagaaagcaggaaagatctaaaatcgacaccctaacatcacaattgaaagaactagagaagcaagagcaaacaaattcaaaagcaagcagaaggcaagaaataactgagatcagagcagaactgaaggagacagagacacaaaaagccgttcaaaaaatcaatgaatccaggagctggttttttgaaaagatcaacaaaattgatagaccactagcaagactaataaagaagaaaagagagaagaatcgaatagatgcaataaaaaatgataaagggatatcaccaccgatcccacagaaatacaaactaccatcagagaatactataaactcctctacgcaaataaactggaaaatctagaagaaatggataaattcctggacacatacaccctcccaagactcaaccaggaagaagttgaatctctgaagacaccaataacaggtactgaaccaaggtttggaccaaccaaaaatgtccaggaccagatggattcacagttgaattctaccagaggtacaaagaggagctggtaccattccttcagaaactattccaatcaatagaaaaagagggactcctccctaactcattttatgaggccagcatcatcctggtaccaaaacctggcagagacacaacaaaaaaagagaattttaggctaatatccctgatgaacatcgatgtgaaaatcctcaataaaatactggcaaaccaaatccagcagcacatcaaaaagcctatccaccaaaaccaagtcagcttcattcctgggatgcaagactggttcaacatacgcaaataaataaatgtaatccatcacataaacagaaccaatgacaaaaaccacatgattatctcaatagatgcagaaaaggcctttgacaaaattcaacagcctttcttgctaaaaactctaaataaattaggtattgatggaacgtacctcaaaataataagagctatttatgacaaacccacagccaatatcatactgaatgggcaaaacctggaagcattccttttgaaaaccagcacaagataagaatgccctctctcaccactcctattcaacatagtgttggaagttctggctagggcaatcaggcaagagaaagaaataaagggtattcagttaggaaaagaggaagtcaaattgtctctgtttgcagatgacacgattgtatatttagaaaaccccattgtctcagcccaaaatctccttaagctgataagcaacttcagcaaagtctcaggatacaaaatcaatgtgcaaaaatcacaggcattcctgtacaccaataatagacaaacagagagccaaatcatgagtgaactcccattcagaattactacaaagagaataaaatacctaggaatccaacttacaagggatgtgaaggacctcttcaaggagaactacaaaccactgctcaacgaaataaaagaggacacaaacaaatggaagaacattccatgctcgtggataggaataatcaatatcacgaaaatggtcatactgcccaaggtaatttatagattcagtgctatccccatcaagctaccattgactttcttcacagacttggaaaaaaactactttaaagctcacatggaaccaaaaaagagcctgcatagccaagacaatcctaagcaaaaagaacaaagctggaggcatcacgctacctgacttcaaaccatactacaaggctacagtaactaaaacagcatggtactggtaccaaaatagatatatagactaatggaacagaacagaggcctcagaaatgacaccacacatctgcaaccatctgatctttgacaaacctgacaaaaacaagaaatggggaaaggattccctatttaataaatggtgctaggaaaactggctagccatatgtagaaagctgaaactggatcccttccttacactgtatacaaaaattcgctcaagaaggattaaagacttaaatgtaagacctaacacctagaagaaaacctacacaataccattcaggacataggcatgggcaaagactttatgactaaaacaccaaaagcaatggcatcaaaagccaaaatagacaaattggatctaattaaactaaagagcttctgcacagcaaaggaaactatcatcagagtgaacaggcaacctacagagtgggagaaaatttttgcaatccacccatctgacaaagggctaatatctttgtagaatctgcaaagaacttaaacaaatttacaagaaaaaaacaaacccatcaaaaaagttggcaaaggatatgaacacctttacactgttggtgggagtgtaaattagttcaaccattgtggaagacagtgtggtgattcctcaaggatctagaactagaaataccatttgacccagtgatctcattagtgggtatatacccaaaggattataaatcatgctactataaagacacatgcacacatatgtttattgcagcactattcacaataccaaagacttggaaccaacccaaatgtccatcaacgatagactggataaagaaaatgtggcacatatacaccatggaatactatgcagccataaaaaaggatgagttcctgtcctttgcagggacgtggatgaagctggaaaccatcattctaagcaaactatcatgaggacataaaaccaaacactgcatattctcactcataggtgggagttgaacaatgagaacacatggacacagcacaaggaacatcacacaccggggcctgtcaggggttggggggctgggggagggatagcattaggagaaatacctaatgtaaatgatgagttgatgggtgcagcaaaccaacatggcacatgtatacctatgtaacaaacctgcacgttgtgcacctgtaccctagaacttaaagtataataaaaaaaaaagaaagaaaagaaaagaaaaaaagaagtggcttttacctcccaccacgattctaaggcctctcagccatgtggaactgtaagtccagttaaacctctttttcttcccagtctcgagtatgtctttatcagcagcgtgaaaatgaactcatacacacacacagaagtatatctttacagttcccaggatggactgcaagtttggctctaaatttcctttgcctggccaaaacaaaaagaacacattttattataaggttcacaggcttttaattgaaaaaaaaaaaaaaacagttattcaacatgaaaactctttttcagacaaagttctacaaagtctatttctcacaagtaggactttggcaaggattgtgcaactgacaattcaaagtcatttattccgtggtgagaaaccggagtacagatctttaccagttaggggatgatccatgtgttttgataatcaccttggtggtgatcagactaaaggtctcctatgaaaaccattaacttcacactatagctgataggatgcactgaagcccttaccgctgactgcatggatgagagctaggccagagcattggcaggcagagtttataacatggggcaggaagcattgaaattctattccacctcttggtgtatcaggtcaggagtcaaatctcctatcttcctcttctggatcgctttcctcctgaagtgtctggcatagatgtctaggtatagcttggcatggtggtgtgtgcctatagacccagctacttgagaggctgaggtgggaggattgcttgagcgcaggagtttgaggctgcagtgagccatgaccacaccactgtactccaccctgggtgacagagcaagaccctgtctctctttctaaaaaaacaaaacaaaacaaaacaaaacaaaaagaaaaaaagatgtccaagtgtgttctggttactgctgctgactgctaaatttaacagctagaaaaaaaaagtttggactctatggatcataaatttggataagacacagagggaatggcttgtctcatgttcacaatgtctaaagtcttaaatggggagagtcgtcaaccaggggtaatttgagagttatgggctggaaccaccttgaggcatctttattcataggctagcaattgatgttggctgttggctgggacgtcagctggagctgtcaactgggagacctgtctgatatcccagcataggacactagacctctcacaaagtggcgagggctccagaagcaagtgtcccagctgacaaaaaaaaaaagtttcatagccttctacgacatgcacttagaagtggtaatgtgtcacttccagccctttctgttgattacaagtgagtcatgagtccactcagtttcaagggagagggcccagatcccatatctccatgggaagagtgccaagaacaccttgtagaaaagcttgtggataggagatattggtgtggtcatccttggaaaacacaatcttccacagtgtgcaagagaggcttcctgctctgcattgtggcttaattattgttgaaataccaggcaagaaaaggtaggatccagggaaacaaatgtatccaggatgttttggtctgccttttctaggaaaaaaggaaaccctcaaagcctctgagactaggtcaccccagtgggactagaagttccacgtggaaccttctgcaaactcctctgcaatagatggactgtgcattttccaaatgtgtctttacatcatctcctttctgaccttgggaagatagtaactgactgtggagtaggaaatccagaaccctgattgttttaaaatatattacagatacaagtaatgaaaagaaggctcctaaggaaaatatagatccgtaatggctttgtcccaaaagctattaggctataatattttattacaaaggctatatttattacaaaatgtatttaaataaatacttaatatttatttaaataaataatatttattttattattaataattaatatttaaataaatataatatttcttacaaaaattaaaaactgggactttatatttaaaggtgagacattaaattctttttaaaaagtgcacatgtaagatttttttctcaagtcaactgaaccagttcatcagtttcactatgaatgtgttgatgcaccaagtatttactttctagaacatctagtagacgtcactaaaaaattataccaagttgaaaaatgtcactgaatcagaggcatgtggttggttatgtagtcatctgtgccagctgggaatatagcaataccaaatgaacagcactgccatgttcccttgctgggttccagcaaaaacactcatcttcactgtcgtctctctttgagacctcttagagaggactttgatgagtgtatggtcttatacacactagtctaacaatacacatttgctcaaggattgggttacgagcaggctcttcacctttcaggtgaacaattacacatcaggagaaggatggaagtttcctatctatgaacaaatatttcccaaagcaataatctctttattcaactcacgtaatgagaagtcagttcctctgtgccataaagcaatctctttgaagtcttcagtaatgttgagggttttaatgttgagggctttatcaaactaaacattcaagtgtcttaggctttccccttagttctttgagcaaattggttgctatgaagtatgttagtgttccgaatgaatggatagcatgatgggggatgtctaggtggttccagaatttagattgtggtttccataacaaagtgtggcagtattggcattagggaagagaaatgacttctaaataacttctcaaagtttactaaagccttaagaatgtaggaaatggccacaaaaggaggtatacaaaacattcctctgtctttattcctctttatacaaacgtattcactttcccatcagcaagtcataaaatacttctcatcttgcattacagtaggacacctactataacaataggctacaaaatgtataatggctcaaacacctagcagtttatttcttatttacttaacaatgctgggtccacgaacatgttgatatcataaccctcttttatgtggtcactcagggactcaggctgttgagggctctgtcatcatgaatgggtggcttccaaggtcatcctaagagttatctccattctaaccagtccagccagaaaggcagaacaggcttggaggagcaaagatatccatggatagatcatcctcttaaagtcattgtagcattgtgatagggctcttttcacaaaacaaggatacaatccatgttttcaagattttacattttagtagccacaatacaaagaagctaagatagtcttgtgatttgtcatcatggctgttaatggagagtgttttaaaagcactgatatcagggctccaccctcagcttccaatcatcaggtttggatggaacctgacagctgcatcttgtaaaactccacgggagattctgagagacagccaagtttgagattcacaaaccttaagagaaaaaatctccttgaattgccataacaaactaccagtctaataaaacatacatattcctttgactactcttaaatgaaacaaataggtaataatttacctgtacatataattaaaaatgtaatgtattttataaccatcatataaaggagaaattatattaaactatattaaaataaaatgatatatatttcaatgcagatgcccaagcttgactaaagtaggaaacataataaagtaataaaatgcttatatgtacttataatgaatgtttggctatgagaagatgatcagaggctttttgtccaagaagtacaggcatatgaaaaagtagagcaagagatggacaccagactgagaaaactaaaaactaaccaacctatttgtgtatgataaaaggagagaaaaaaaattgattagtaaaaatatgctaccgtgtggtctgaatgtttgtcccttccaaaactcatgttgaaatttaatcccccatgtggcagtattgagaagtgggacctttaagaggtgattggttcaagaagattctgcgctcatgagtggttgaaaccattcacggaataacgggttaatggatcaatgagttatcccaggagtgggactggtagctttataagagaaggaagagagacctgcgctagcacactcagcctccttgccatgtgagccatctcgggaccccgcagagtccccagcagaaagaaggccctcacccaatgtgtccccttgacctaggatttctcaacctccataactgtaggaaatgaattccttttctttgtaaattatccagtttcaggtattctgttataaacaacagaaaatgggctaaaacacacgccaagaaaattgaaagactgtggaagtgaaagaagaataaaaaatgaagtaattttgcaaatgagtctggctttattataagtgtattgtcaaagtgattccctttgttataagatgaaaaagagccaaaatggatagaaacatttatcctatcttaatatcccactacattcaaggcaaatattcagtcagtctctagaacttaacaaggccttggagatgatatcctttggatgagcaatggagaagacaagatggattggaaaaagaaacaaacaaacaaaaaaacatgtaagaggctatcaggaaaactctggagacgatgtcaatgtaaaacagatacaaacctcaaaataattttaatatgtacattgcacaaaaatggacttcttatcatgttacaaatttattttaaaacatataggaggcaacaacaatatttcattgatgtgtactattttataattgttggctctaattttatttagtagagtcttacatctcctctctacatatttacatccggttgtattgtttttgtagtacctgttcaactgcactgaaatcatttcaattaaatgcatggttgaaaagctgacataatacattcaattgccaaattgcataaagtgaataagctatttaataatttggagaaaatatattccatttaaacttccttctctataaccagttcatacactggaccttttgggcacagccatgtgaaagcttttcaaaacttttcactacttttttttgagacggagtctcactctgtcacccaggctagagtgcagtggtgcgatctcggctcactgcaacctccacctcccaggtccaagtgattctcctgcctcagcctcccgagtagctgggattacaggcacctgacaccacacctgactaatttttgtaattttagtagagacaggatttcaccatgttggccaggatggtcttgaactcctcatctcaagtgttccgcctgccttggcctcccaaagtggtgggttacaggcatgagtcattgcacccagccactatagatttttatttgtagtagatttagttcagtagggcatttgagaggcataggaactggaacaaatccttcattgtttgggactgccttgcacattgtaggacatccagtacagtcccttccacgaagtggcagcagcagcctcgggctgtccaaacaccctgttagggacagtgccactcccggaaccacagaagaaccacaatcataggagaagcatacaacaaacatggtgttcatcggacggtcagcttcagtggcacttttgagcaagcacactatttggttgtagaatgagtccctggcagggcacccgaaaggctgatgtgtgactcatccctagtacctctgagaatgctgaaatctcctccttctccaagctgagtggcagctttctggtccagactacttaaattgtgacttgaggaattttcttcactttttcctttgagtcattctgtttttgatcaagatgcgatagaatgaaggattctttcagggtctgctgtcacatccttcctttgggaacagatagaaaatctggcctggcttgaagagtttgtcctcaaacatctggtaagccataggcatcagcatctcttacttctccagagacatttagatgtgtcccccatctccatggaggcccatggcaaggggacccctagttgtactagagcttccttctgggcacagccacactgcacaggcactgcagtgtacagcacagctcctccagcttccggaagactccattatctagaaaagtgctgagaaatggagaagggggttcctctggggtggagatggaaagaggaaaaggaagggagaatgtccaagcaaaatgagagaaggtgagggacagcagaattgagagtgagggagagggagagagcaagagactgggttgagatgtcttgtacatgggggtgtcctcgtggcttcactcccctttcgtttgtaccactccgtttccccagactcttcctaaatatccccttattggctacaagatccagattgcctagaagctcagatttgctgacagcacctcaagactggttaatgacatatagattttttcttgtttccatctttgggatttggagcaatctccagagttgcaaaagcctaccttgttgcaataatatttttgagggtccacactgtctgctcacttgctctatgctgctgggcacagtggtgtggccatccagggtgggagagaccacctgggatatggaaattaccagcagccctgttttgctcttgcagtggttgccaaagcacacgaagcattctgggaatctgaatttctgttgtttctcccaaatggcccctgaagggcaacaggcagcacacatggaccacattttgccagaaaagtccagaaagaagatggctgctgttgtcaactattggcatttcaacaggacctatttttatttctcagtatatttgcacaactaggaagcatctgctgacaaggatgagatgataagctgtattgatgccaaaacaggactagaaaaacaggcttgttctgcaaatggcctgcatcctgagagtccgtgttaagaacattctctctctgcaggcaatatctgctcttaaaacattaacacttgaaaggaagtaaggcttggaatccttagcatagttatgcacacactaggttctcagtaagtgcatgctggatgaaggaacccacacgcaccttaaggaggatggaacattggcagcccaagaaaaaagtcactccccagaggccgagtgccatgtctttgacctccattggcaaggtcatggtgaaatgctgtctcttggggtcgctgaggtcccagcacggtgtgccttcacaccgtgcaaacaataagaagagaagagaggcacacatgtcacctttccaggcagggacatccaagctgtttgagtctccattctgtgatttccttgaacaagaaagggattattggtgaatgaggccagcatcctgggtgggaacaaaaaaggaaattggtagaaagtacatcatccaagttggtctaactcagccctgtggcttgggcgggttcctaggatatccagccggaggcagaggctctaggggatgtgaggctgcactgggtatgatgacacagaggactgtgagaggcagagaaaaggggagaagagctgaggccctcctagccctaacctcccagctcacaccctctgctatctgccacctccaggccaacaccacggccatgggaggtttgcccatttttctgatagacacattctttctctaccaacagcccacatggaacataagtgaagtaattcagcagtttccttcttaatctgctgtctctctgctgcttactcattctgtgctgtttgctttagatcaaggtgccccagggtaccaaaagctacattatcctattcaactgcatggaaaccaagatcccgaccattctggtttgttgttattgttacgttagttttaaaccttagccattttccattctgggcagttacaactctgtttactatgagttcctctgtgtagatgtttctcccatacccgacctacaaactgctacgtgagcagtaacttgtcaccatgttatccgcataaagtcagggattgataaacttgggagcctttagctcttgaaggtgctgatgaggaaggggagaggggaggagaaggaatttgtttgtgagatggtcagtgggctgaatagtggtatgaccaaaaagtgttactataaatacacataatctggaaaacaaaaatactgtcatctcctccctgcaaggcgctgtgattaggcaggatggagcttattgctgcagtgttagaaaatgcatccttgtagtcccaaaaaagcctgttccatcctgcccatctcttgttctcaatacttcttacttcacggtcactcattttcttcctgtccttgggttgaggtctcaacttcttgtaatagaattttttcagttataagcgacagaaatccaactcacactatcttaagcaaaaaggggattcactgatacgtgtgttaggaaggatatatgaaagctcaaaggtcaagtgaaaaaaatgtaagaacgaagaccttggtggggtgtggtggctcacgcctatcatcccagcattttgggaggccgaggcaggtgggtcacaaggtcaggagttcaagaccagcctgcccaagatggcgaaaccccatctctactaaaaacacaaaaattagccgggtgtggtggcaggctcgtgtattcccagctacttgggaggctgaggcagagaactgtttaaacctgggaggcagaggttgcagtgagttgagatgtgccactgcactccagcctgggcggcagagtgagactctgtctcaaaaaaaaaacaaaaaaaaaaaactaagaccttgtgactactacctactacctggatctctctctctctctctctctctttctctctctctctctcacccccccacactatcacctctccttgttgtcagtagtttcctttctgcagacaggagttccatgtgctgggaagagggccattcagagcctcgtattctcatcctctcagtttagcaatgcgagaagaaaaaacttttgtctcacaacctcatatacaatctcagaaataggctcttattttctggcttgaggctgtccagaggcaccaggcactgtgatggtctcactttctgtcctggatctatctgtggggcccagacagcaggatctatttcagaaaataggcgagagaggaaaaacttatgtggccgtaaaaaacagcggttttcaagtggcctatccccatccacatcataaacttttctgctgaggcttaaaagtgcttagacttcaaacttgatctaaaacagaaatcctacctggaaaaatcaccttccagtcacttagccaatcgctcatcactctctgtctctgaatctcaccacgagtttcacacgtctcccgagagagcgtctcctttatcattaccacatgtggagtcagcagattgggtttcatctaagctctgcctacctactatccgagttccctagcaggttagtgactttctctgcctttttgtttcttgatgtgaaaaggaacaacagtggctgctcacagggttgtcagttacatggtcaattacattacatggacaattcatgatggtgtcagacctgtctgagaaaaggtggcccatgttaccatgacaggccccaaggctaacagcccctttctgggtcatggctcatacaaaggagccctccttggtttgctggtgctctgagacttgcaaatgcattaggaattttacactgtaacccggttttaaatgggtccagagcatccccattgctagactactgtgctgaggaagggcactggctcattgttacatcccatgaacactctgggtctcctagacctcatcctctttgagcttctctctctcactctctctctgcgcattcaggagtgtacacatttctgtccagcaccctgaagtctctggaagagaaggaccatatccaccgagtcctggacaagatcacagacactttgatccacctgatggccaaggcaggcctgaccctgcagcagcagcaccagcggctggcccagctcctcctcatcctctcccacatcaggcacatgaggtgaggcatctgtgggcttcctacaggagagacataaagaaaacatgcccccaaacctatgtgacagctggccgggaaggactggtgcctgcatatggagagtgcacttgtgacagttcctggcatagaataagcataaatgctataggaggacagaagagagaggttttaaatctgcgagggtcacagggcaagtgtcagagaaggcatagaggaagcgatacttacgcttggtttaaagcatgtgctttggggcagtggtttagagattgggtgcagtgtgcaaataggaggagggggccaatcaagagaagtcagtgaatgtacacatcccctgaagacactgggtacatctgttatggtccctgtgtacactcggatattctaaatgagagaccctggggccagatgcctcacggagagtcaatgttgactccttcatacctgttgaaccccttcttgtcacccccattgccattaccctagtctaagccaccatcattttctgttggacttctgtgccagtcactggatgtgtatccctgcctgtaatctagatcctttctagatcattctccatgatgtgtccagagtgatcattctagaaccaaatctgatgtcatcctcctgcttaaaacccttaagttctcattgcttttagataaaatataaaccctttcactttgtttttattactccttatgattcagcccttacttagcttacaaggacttcctcatgtctgagctctagccataatagctgactgttggatgagtcatcggggggaggttcttcttcaggctgcagattggcggtcagccctcctgacctcagctgggctcactcacacatctgggaggcagctgcctgaggccagggtgactctgctctatgcctcatgtctcctatcctccttgtacccacatgttagctgggacatgttctcatcgcaatggcagaggcatgagaaagtgatcctgtttgggcaagtgcattttactcttttctttcactcatgtccactgacatttcattggccaagcaagcatgtggggtgtccagagtcaaagagggacatgttgccggggtcatgactatttctgagcaataatctaacctatcatagctcagatctcactccttgcaggaagcatctcctaatccttaagacctagttggaacttacactctgttcttccctatggttactgcccattttactatttttctgcccatttagactgacaactctgtgagccatcattgcaatatggcttgcttacccaatatcacctagcatgatgtagagcacatagtaaatactcaacaaatgttttctgtaagagctaaggaaggacatcagcagacaaaatagagtctttctatgccaaaaggtgaaagtggtctcatttccattccattgtcctgtaatttggctagccaaaagcttagtggataccattcccataagtagacctcatctgcagggaagagatggggagactgctgggttatttattgcagactccagcaggaccacaacaatgattcaaagtgatgacactagaaggacaggtgccaatgggtgatgaagccacaatgacgatgtcaagtggtatcactaaaaggacaggtactcatgggtgatgaagcctacatgaccttgggcttacaccaggaccctaggaatgaaagagattccttctcttagtggctatgagggaaggcctatgatgtcttaaggaggttggattcgatcatttttaagggaccttcaaatccttagaccgtgattcaaatggtaagaagtttgctccattaaactcccaggcaccaccctttccggagacaacctttaaaaattattagctcctgggaaaatagatgtatctcattttctttgtatccctcacagtgccatatgtgaagacttacatatggtatatgcccccaacattactactgagtgagtgaacaaagaaatgagggaatgaatggatgaacaaatggctcatggcaggcttttccctgccctgtgaattcggcttctacttggtaagaaggtgattgcaatctctgttctcagggttccccaaggattcctgtgtaacagatgaaggaatcacgtctgtcaggtagagtaggtgactgcattcagagtatacatttccagtctcccctgtctttttcttttgatgagtattatagagagggaagccatgagtggattagatgccaaaatccctggctgagagaataaccttaccctggaggaaaacatattagctttgactctgagctgggaatttcggtgatgttgtagattcaatgcattgcagttgggtgtttttatttgttgaaaggaattgctgaattttcaaatccattaactgcttgtcagcattagcaagcctaattagttaatactaagtaaatttgcactaaatatacaaccctggctgattttactggccacgtctggcagagggcagcagcagggagaaagctctgtagagtttctgttggaatcgtgtgaaaagctggagaggttgcttctctttctctctctctctctttctctctctctctctgacacacacacacacatacacacacacacaattgtaataataataatattttggttcctcactaagccaatctaaatcgcagaagtctattttgttaagtaagcttggccccagccatatgttgctactcagagaatttaatatcagatttcatctgactgtaaacgtgaatcatcaggttgcacaaggaacacagtggcagatccagggggcatttaacttttatagcattttaaatgaaaaaaaaaaaaagtaacacttaaacaagtaatttagatcatgctgtaggccctgaatagctttgatgttgtgttttcatggcaagtctccaacttgagctgaattttcccctactaaaaatgcaaatttttctaagaccttctcttggtcctgctactcatgatacatatttcttttaaaagaaatttcaaactagataatagttgttctcctccccacccccgccaccagtagtgtggtggggcagcagagttgtggctagtggaggagagcagaggaggagagtagggaaaggagaatgccatttgcctacatttccctctgcccatttcccgctgcccatttccccccttgttttcctgaacgtgaactgagctctgggcactgttttaggcctagcaggggacaggataaagcctgcttctctaggaattcgcactgagggtgtgagtgtgtgcacgtgtgtgtttggaggcgggagaataaacacaaataaataaaaaggagaatttcaggcagtgataagagtgctgagaaaaacagaacggtgtgaaagaggaaggctgagcctgcagaggcttgaggctgctgccactgggtagcggtaggcctttccgaggaggcggcatttgaagaccggaggaaggttcatcccagcaagtaggaacagcaagtgtaggtcccctaagtcttgggggagcttagttcctttaagggcagcacaaaaatcagtgtggctccggagagcacattaggggagagaggcaggaagagcttggagacatggatggaagctggaccagttgggccttgttgaacatggaaaggcatttagatcgtattctgagttaaatgggaagtgacgtgagagatttaacaatggagcgtcttgaactgctttactcatttaaaatacccactcctgcttggctgaatatctcatgttgtctttttagaagctttggcgatcctatttgaatgcatttaggtcctattggaggggaataggatctcatttgaggccacggaggtccatggaagtcacctgcatagcaaataccctgaaagtggctgcagggagagtgtgagggtgggaccgccctggtaggaggtggaaaatgaaaaacacacggccatgagttccagattagggcttctgaaagccctcagctttcccagctcccatcctaaagtgggtctttaaacaggaagaaagaaagattgctaagtgtctttggagttcctcttccttccccttctagggatttcagcactcctggggctcgggttggctctaaagtagtcctttctgtgtcttcccacctacagtaacaaaggcatggagcatctgtacagcatgaagtgcaagaacgtggtgcccctctatgacctgctgctggagatgctggacgcccaccgcctacatgcgcccactagccgtggaggggcatccgtggaggagacggaccaaagccacttggccactgcgggctctacttcatcgcattccttgcaaaagtattacatcacgggggaggcagagggtttccctgccacggtctgagagctccctggctcccacacggttcagataatccctgctgcattttaccctcatcatgcaccactttagccaaattctgtctcctgcatacactccggcatgcatccaacaccaatggctttctagatgagtggccattcatttgcttgctcagttcttagtggcacatcttctgtcttctgttgggaacagccaaagggattccaaggctaaatctttgtaacagctctctttcccccttgctatgttactaagcgtgaggattcccgtagctcttcacagctgaactcagtctatgggttggggctcagataactctgtgcatttaagctacttgtagagacccaggcctggagagtagacattttgcctctgataagcactttttaaatggctctaagaataagccacagcaaagaatttaaagtggctcctttaattggtgacttggagaaagctaggtcaagggtttattatagcaccctcttgtattcctatggcaatgcatccttttatgaaagtggtacaccttaaagcttttatatgactgtagcagagtatctggtgattgtcaattcattccccctataggaatacaaggggcacacagggaaggcagatcccctagttggcaagactattttaacttgatacactgcagattcagatgtgctgaaagctctgcctctggctttccggtcatgggttccagttaattcatgcctcccatggacctatggagagcagcaagttgatcttagttaagtctccctatatgagggataagttcctgatttttgtttttatttttgtgttacaaaagaaagccctccctccctgaacttgcagtaaggtcagcttcaggacctgttccagtgggcactgtacttggatcttcccggcgtgtgtgtgccttacacaggggtgaactgttcactgtggtgatgcatgatgagggtaaatggtagttgaaaggagcaggggccctggtgttgcatttagccctggggcatggagctgaacagtacttgtgcaggattgttgtggctactagagaacaagagggaaagtagggcagaaactggatacagttctgaggcacagccagacttgctcagggtggccctgccacaggctgcagctacctaggaacattccttgcagaccccgcattgccctttgggggtgccctgggatccctggggtagtccagctcttcttcatttcccagcgtggccctggttggaagaagcagctgtcacagctgctgtagacagctgtgttcctacaattggcccagcaccctggggcacgggagaagggtggggaccgttgctgtcactactcaggctgactggggcctggtcagattacgtatgcccttggtggtttagagataatccaaaatcagggtttggtttggggaagaaaatcctcccccttcctcccccgccccgttccctaccgcctccactcctgccagctcatttccttcaatttcctttgacctataggctaaaaaagaaaggctcattccagccacagggcagccttccctgggcctttgcttctctagcacaattatgggttacttcctttttcttaacaaaaaagaatgtttgatttcctctgggtgaccttattgtctgtaattgaaaccctattgagaggtgatgtctgtgttagccaatgacccaggtgagctgctcgggcttctcttggtatgtcttgtttggaaaagtggatttcattcatttctgattgtccagttaagtgatcaccaaaggactgagaatctgggagggcaaaaaaaaaaaaaaagtttttatgtgcacttaaatttggggacaattttatgtatctgtgttaaggatatgtttaagaacataattcttttgttgctgtttgtttaagaagcaccttagtttgtttaagaagcaccttatatagtataatatatatttttttgaaattacattgcttgtttatcagacaattgaatgtagtaattctgttctggatttaatttgactgggttaacatgcaaaaaccaaggaaaaatatttagtttttttttttttttttgtatacttttcaagctaccttgtcatgtatacagtcatttatgcctaaagcctggtgattattcatttaaatgaagatcacatttcatatcaacttttgtatccacagtagacaaaatagcactaatccagatgcctattgttggatactgaatgacagacaatcttatgtagcaaagattatgcctgaaaaggaaaattattcagggcagctaattttgcttttaccaaaatatcagtagtaatatttttggacagtagctaatgggtcagtgggttctttttaatgtttatacttagattttcttttaaaaaaattaaaataaaacaaaaaaaaatttctaggactagacgatgtaataccagctaaagccaaacaattatacagtggaaggttttacattattcatccaatgtgtttctattcatgttaagatactactacatttgaagtgggcagagaacatcagatgattgaaatgttcgcccaggggtctccagcaactttggaaatctctttgtatttttacttgaagtgccactaatggacagcagatattttctggctgatgttggtattgggtgtaggaacatgatttaaaaaaaaactcttgcctctgctttcccccactctgaggcaagttaaaatgtaaaagatgtgatttatctggggggctcaggtatggtggggaagtggattcaggaatctggggaatggcaaatatattaagaagagtattgaaagtatttggaggaaaatggttaattctgggtgtgcaccagggttcagtagagtccacttctgccctggagaccacaaatcaactagctccatttacagccatttctaaaatggcagcttcagttctagagaagaaagaacaacatcagcagtaaagtccatggaatagctagtggtctgtgtttcttttcgccattgcctagcttgccgtaatgattctataatgccatcatgcagcaattatgagaggctaggtcatccaaagagaagaccctatcaatgtaggttgcaaaatctaacccctaaggaagtgcagtctttgatttgatttccctagtaaccttgcagatatgtttaaccaagccatagcccatgccttttgagggctgaacaaataagggacttactgataatttacttttgatcacattaaggtgttctcaccttgaaatcttatacactgaaatggccattgatttaggccactggcttagagtactccttcccctgcatgacactgattacaaatactttcctattcatactttccaattatgagatggactgtgggtactgggagtgatcactaacaccatagtaatgtctaatattcacaggcagatctgcttggggaagctagttatgtgaaaggcaaatagagtcatacagtagctcaaaaggcaaccataattctctttggtgcaggtcttgggagcgtgatctagattacactgcaccattcccaagttaatcccctgaaaacttactctcaactggagcaaatgaactttggtcccaaatatccatcttttcagtagcgttaattatgctctgtttccaactgcatttcctttccaattgaattaaagtgtggcctcgtttttagtcatttaaaattgttttctaagtaattgctgcctctattatggcacttcaattttgcactgtcttttgagattcaagaaaaatttctattcttttttttgcatccaattgtgcctgaacttttaaaatatgtaaatgctgccatgttccaaacccatcgtcagtgtgtgtgtttagagctgtgcaccctagaaacaacatattgtcccatgagcaggtgcctgagacacagacccctttgcattcacagagaggtcattggttatagagacttgaattaataagtgacattatgccagtttctgttctctcacaggtgataaacaatgctttttgtgcactacatactcttcagtgtagagctcttgttttatgggaaaaggctcaaatgccaaattgtgtttgatggattaatatgcccttttgccgatgcatactattactgatgtgactcggttttgtcgcagctttgctttgtttaatgaaacacacttgtaaacctcttttgcactttgaaaaagaatccagcgggatgctcgagcacctgtaaacaattttctcaacctatttgatgttcaaataaagaattaaactaaagacaacgagtttgttttttgtaagctccacttcttgctagcagttcaccactgatcctctaaaatcaaagtggttaaacgatctgtcacacacagtgagtctgaatgctaaagcctctcctcacctcactccctctgcccaacacccccaggtgtatcaggaagtgtgtggacactgtggtcaggcagaactggcctcaattcttggcttcaccacttacaaattttatgatcattggcagttgatttttcagagtttcggcttccttatcaacaatatgatgataagtaataacacctaattcacacgatggtggtgaggactaactgaggtgctcattaaacatagttgctgttttttaatgcctggcccaaatccttccctgtgagggagaagaaggatgcttgagagtggttatttatgaatgaatgagtgaatggaagaatgagtgatctgaaatgatataattagcttaaaaacctctccctcattctgaaggtaaagcaggaacaattggtccacccccaccccaggtttccatttcaggactcccttccctttttggagctacctgcgtgcttcctttacccattttctcagatttaactgatgaattgggagggggtgggtataggacttactgagatgcaacataatattcacacaggctctgcagctagattactgtttgaatcttcattctacctttttttttttttttttttttgcatcaccttgggcaagttgagttccctgggcctcagtttcttgacttgtaaagagagatgacagtgcatctgcctggaagggttcttttatgaagaccacatggttcgctcatggagagtatggaaggaccgtggctgacactgcttctccctctccagagtcttccgaaactgcacgttggactcatttctttattaggatgggttgagggtcttctcattgtttgagtcacatggatttcaggaaactaattcattttcttgtccaagcattcccttggcaagttcttcaatccctgttttcaatggtttcctcatttctaaaatagaaacaagaatagcacttaccctatagcagtactgtgaagattacaagactggacatgtgaagtgcccaggatagtaccacacatagtcagcactcaatccacattagctatttttatcacaattattgttgccctgtctgagcatctacatttaatagaatgatggatatgtttagatttacatttttcacgttattatcgttttgtacatgcctcctgtctttgttcctctgttcttactgcctttcgttgttttagtgatattatggtacaataagaaatatatatttggtctctggccccagtttctgagacaatttctaaaactcttgtagacaggggtgctaggaggctcttttgttctaatatttggtctttgaccctggtttctaacacagagctcccaaatcccttggaatttcctgggcaatagaaacttctt

SEQ ID NO: 188 - DNA, 637509 bp, Homo sapiens
  source 1..637509: mol_type = genomic DNA
aatcacctggagatcttgtgtaagcattccaaaacccaggacacatcttggatcaatgaaaccacaatctctgtgggtgggacatgaggatcaggaattttgacactccccaggtgatttcaatatgcagacaaatttggggaccactggcgtaaaaataaaccacttataaacaactggtgaaaataaaagtgatcccttaaaaagataatgcatttgtcagaggtacttgttgtttatgtattgagaaagacaacatgctgaagtgtcaaaatcctacttcattttcttttacacctatggcaaccatgataaatatgtcagtaccagaaaagttgtcctgtaagaattttaagttataaaaacagcaagacagttctaacaggaattctttaaagtgtgtgtgcgtgtgtgtgtgtgtgtgtgtttatgcctaacatattttacaatgaggacctcttgtagaagattacagacatgatttttccttttaggtttgtatcttgcattgtttgtttcagtcccatccaagcacttaaaaaatatcaaaagtaaaacatgtcagattttatgttgaactgttgccactcaaaggacattaaaatataaaaaagacaatactgagctatcttgttcggtactgcatcttagtcatttaggtaatctcgtggccctaaaaccaattcagtttagtggcctttgtgtcatcagcttgcttctctagagaaccaaccacctctgaaaggtgagaaatacggtgggcaaacacaatgacaaaacaccctcaagataggcagagaagccaagaaagcacatattagcacttcggtgatggctccaggagggtccagtggaagctacaacttgaccctgagcagcaagggctgtaacctctctgagtgtaaaaggcaagaggaggccatttgctgtcagcagtgctgtttaaccctcttgaattcgaagacagctccccctcctaattcacacggatctctaagctctgcttgttgacttctcattcaggaaatctggtcagcagctctactgctgctccacatagcctgcagcttgccaaagagctcggagcaagcgcatgatttaattgttgatagagggaaataatgggtatctctagcaggctttaatatgatcttaaaatagggggagagttttctgttatgacattgacatagaggcgatgattttgagtaatgcaggatgatgtggagatgctttaagattaaataagagctatataaaggcttgtcagaatgaattctaatgtgccatgagacactttgcatactcttaaatatgcaaaatgtctcttggcaccctagaattcattctgacaagcctttatatagcacttatttaaactccgactttatttttagggaacaggtactcagagatactctttgaatggaagcaacaaagggcagtgtttatcaatttggttctttagcggggggaaaaaaagaaacacaatacaaaagagcagtcaaaagtggaagcttgtttaatattgctctaccatcatcctgaaaggcataataatttgagttacacatctgaactgattggagttacagaatcatatctcctttttgcatttaacaatatatacaatataaaataaatacatttacacaaatggacatttgctggagcacacagtatggtacacatcacaaaaatatacaattgattgctttacagatgtgaagcccatctacagctatagacatggttttattattattattattatttttactactggctataatgcaactcctggattattataagcagtttaaattttttgtccttttacgatctttgcacataagactgccataaaatgttttcctaggcaggtaaacagagacgcttaaataattaaaatacaatcaccaacacccattttctcttctataagaaaaatagcagttttaaattttttatatcttttatgttatcatttaaatgcaaaatagtggaataaatacaacaatctgatctgattgaaacacaagtgtaactacaaggagtcacacaatcatattgctttaaataagaacgaacctaaaagaagcaaaattaaaattaaaatcatatggctaaaacatacacctttataactttccaaaacttcacattaagtaaatggtcttgcttgaaacttgagaagacttccctctagtgaggtttaagatgagcatttaccctaaagcccgtgcagttctttttaaatccacgttttagttttatttcctatttgtgagatacttactcttttgtaatgctgagagttacttaaactgaaaactaaaaaattgtatctcattctttgaacatatctccatctcaggttttcagttggttggctcttacttctgaagcccaagtactttaatgtgatacagtgaaaacaatgtatatattgtatatattttatttatatatagtgtagttgaatagtagcaacttaaaccctgcacaaactttctggaaaataatctttttaaacacttacatatataaataatcttatagaatcagcaccttttttcccaggagttgtattttctgttgttatttttaaagggatgtgccaatttctgaactcctatcacagctataaatttcaagttattgaccatctgaatgaattgctaatgatgatttatctagaatcacactacagtcacttctctactgagaaaccacaatctacaatatagtcccatatagctaatgatagatacacagtattcctagcactgggttgatgtttcatcaacccaaggtattttgtttaaagcacacaaagtagcaatagttttggaaacgaatctgcaccaaaaagttttgcaacaacacagagcgagttaataacaacatctgagagatgattgagtgaaagccatatatacagcatttaaaaattagacttatctatattcttgaaatattcaaagttttatttctaagctatacattggtattctataataaaccattagagaaattattccttgttttgaaaatattattatgattttgatgtgtatctgttcataatgaatacttgtttggagtttcaatctcttaattattattaggaagaaccttattactggtaaggaatagaatatactactgtagtctcctgaggaattgtacatccaatattgtctctaattctaccctgtgtctaaaagcacacaccacaagaatccaaacaccacaagaacaagacaacagtctttgaatgcaacataaaattcagaaaagcacagcaaacatgaaacattgaaaagctgaactacatttcttttgtttgttaggattacaattttaattacatctgtgtacatagaataagactgttcacataatacagggagcagctactaacactggtccattggtatagcatttgatggaggttactgtttattggttattcagcgactgtagatttcggggcatctaattgatttcttcattagattacacctcttaacagtctggaacctgacttgactttcatgctgtgacaatactggttgaaaagcacatatattggcttagctcttggtaaaaactgcagattaatttaaacgaacattcctaaatgaataaacttatatggattaggttttagaatttggtcaggcattttctgtctttgatgatttttttttttaattctggcatttgccttattgcctcttaaatgaatactggctcacagctccttctgaggcaaggtctgtgactttgcaaacaggcagtatcacattcctaaccaccatggcagctagaaatcatatggcaattgtacctcccaagtagagaggtgcactcctgacaattctacggatctatatctcatgtgcagtgcttatatatgtgactactcagagtcactgtaggtgtaatctcatcctttgtgtcagtgaacatttaggtaaactggagctcatgttaagaaattgatgtttgggaccagactggcacacaacataaattgcatccgtgataatatgcaccttcccttcaactattgcttgagtaagttaaattcccatattaataaatggctgaaaagtggtaaagctggtacaaaaaaatctccatttgtaagaagaaacaaaacatttttaaaaatcttccttcaggattcatttgtccttcattattgttcgtaattgttcaaagccagcacaaaattgcagtattcttatttctctttagtattgcatgaatgaataaagcttaaactattccctgaaaaagttacatagtagctaaactaacaaatacctggaagacttgaaaaaacaattaaggaatcaaatggctgtaactgatctagatggaaaagcaatgataagaagcagccgatgcaacgttgcttaagttgtctaattagaggctgctcccatgaaatctaatactgcactcagtcaatttgtatatgttgcactgtacttttaggaacgttggttctctctctttgattccttagtcattggggacagtatggttcacaataagttcactggcatccatattatggatctccatcctttggcagggctggcttccatctctcttcagttagagacctcttttaaaagttcagcagcagaaggaagaaaaagaaagatggaaagaaggtcaagaggaaaggaaaggaaagggaaaaggaaagggaaaaaggaaagaaagggaaaggaaagggggaagggaggatttttttttaaactaaagctatttcaaatttagaaaaaaggggaaggatgagaaaagagaggaatgagagtaggtaaagaaaagaaagaaggcaggcagacgggaagaaaataaaggagaatgggaactaggaatgaaagaagcaaagaaataagggaggtgaaagaagaaaaggagaaaaaataaagagaaagagaaatgtgggaagaaagaggaaagaagatgatggagaaagtagaaagaaactcatcaggaacctatggaggaatctgaaagctgcttcatagtcttgctgctaaattatcagtgcagtctgttgatttttgatgttgttaactaaactctaagtttcttcgacatcactcttgggtttattttccctttttcaacatgaaggatgggaaggcccagggagcttttagtcagaccttggcctccaacatttccaaaaaaagtttgtgcattgggactttgccttctagtttgatgttgtagaaatgctgcacggccttggtagaggtctgcctcaggagtggcagtgtcatcagcatcttgccagctcgacgagggtcttccatgtgctggccagcttcataatcctgcagcgcttcatgtaagacatcctgaagcttctgaacggcttcaacatcttctatgtgcatggagtctgtgcaatgaagcaaaagatatgagtaattataataataatagcaaacctatgtagactagagttataaaattagttattaatttaattatttttgaacttctctgagcttgaacctatgatttgttcagagtcttgcatttctacaatctctatttctttccaaatttccctacataatttctaatactagcttagaaaatgggaattattagaaaagatctatgatttaaaatgtgtatttttctttctcaggctgagcaagagaaggctttcttttaacagattacagtcttgactattttattcattgtctcatccaggtatatattcattcactcaataaacaaccacggaaggccatctattgaaagtattatcttagtgctgtgtgggggaaggttgtttaaaattctgatcttgcctggaaaagccaatatttcccaaacaggggaaaaaattgttgactaagattctaagaactccatgtgactacattgaatctagcactatacagaaatcacaataaattatttatcctttcaggatgtttaatgttctagtatcagttgattaaagcatccttacagagtctacttccctgatgaaaaacaaatggtgtcttcagatcactgagttctgaaatatttttcgcatttgtaaaggtgaactttgcccttaaatgaataatttgaaaatctaattcaatcaagcaaagaaagggttaacaaggttgccaaattattcttgtgagaaatgtgagatgtggggaaaaaataaaagttacagctccagctctaaagcagacacttaattatatacaagtttgaatcatttagcacgttttattgattctgatgacagtttatctgttaattacacataatggagtctttgggggattcttcatgtttaataattctagttctctgagaatgctgagctctaagatatatgtagttagcctaatctttcatacaattcaaacatagatcacatgaacaaaaagagagggaatgtaatttaaaatcaagtggctaaatatataataaaaatgaaatatggcaaactaattaaaagataaccagtagcatgtcttaaaaatttatttgtattttgtttagtgtttttttcacttacattgtcattttgaatcattccaccatatcactggtgaactgaccactatttacattaggtagtttaatgacacctctttaaaaaatttttgaataatctggaataaagttgcttataagtatttactgctcaagactcaatttctgcctggcagagcaaaaagaaggaatttttccaagtgggaaatagcattgatagtggttccctggagcgggactcaagtcactccccaacatacgcctggcctttccctgtggattgtttctacccagcttctctccagtctggttcctctcagcatggcaatctcatccacctcctatggtgctgtctcttagaaacaaacacacataatttctaaagttgtctaggggttggtaatcttagggacagaaaaacattcatagagatgatggcaacatgatctgatattctttctctctatttttgcacttaaatgctacctgaaggaaaaatgggaggtatggggaaacactatggtgagtctctagatacacaaaagactgcaatatggaccttgtgcataagggaacagagatgagttggattttcccaacttatcctgggtctaataattagctctctacatgaaaacagagtaatagatggaaggagaaaatgggaattacactctgcagtgacaaaacaaacgaaataactattttccaactagaccaaaaacacaccagaataaaaataatacatttaccatttattaagcacctatttcaggtgaacatggcctcattttacctccccaagccctagaagacacgtggcactggtaatatgtgtcagacacaggtttaaattcaggattcttcaaatcaataatgctgctagaatgtagaacactaaatttgcattcccttaaaaattgggatgaattgtcctctaaacacatcctattcaaactcctatcttcatcagctgtcttctttacaacattcttaatgaagacattgccagttgtatgaaaagtatgtagagtattctccttgataagaggcaaaactaattattatgaatttcctctttaaattttcctaaatctgtctccaaattctatcatttggtcctgtttctaattactagaacaatacaggataaatttcctttttctacatggcatatctttaagtgcttgaagtcagctgcacagttacctcggccctacccatagtcttgcctttcccactactcttgcccagcaggagatatattataggatgtcatgggaaatgagacaagaacaaatagcagagagatatgctcacaaacagcaattaagatttcaaactattctttcaaggctgtgatttagcatgagagatttaaaaatgatttaatcaaattactatgataatttaacttcccatttatagaaaagattctaactcattttagctttacccattctcggatctgctaatactttaaatgcaaactcactaaatttgaactatttaattagacaatgattcagctggcagactgctgaagaaaatattaatctccattagggatcctagttcaagttctggatctgtggttttaatctctgttttgttcttttggttaaatttacacgttgacaccaggctcaatagaactggcattaatgtatgtaatttattttgttttcattgttcatgctggtttctttttaactatgctttaaaggaaatattcctagtatttgtgctaataggaaccagctaaacttaatggatatcataagtttatgaactaactagacaggactaggctacatattaaaaacaatgggcgagctcttaaaaatcttggatactgggcccaagtctagatctatgaagtaagagaccagaactaggacatcagcattgctgaaaatctaggtagttctactgccaagccaggattaagaactactactgaattagacaataagacaagcaaatactattctaaaagaataaatatttcaaaagataaccagagtgtatatgaaacacatattattgcccacatattaagtctaacacctaataataaaatagaactttatcaaaacttccaatattttactctgtgaaagagatcctaaaaaaatgtgtctagttcagatcatttactttgggaagatagctaaatatcatcatccttgcagctgcaaattgaataagacagagccactgaaaaagaagattttatttttatatcttcccttgaataaaatactgcccttctctatgttagaaaatattaatcattgtgggccaggtgcggtggctcacgcctgtaatccaagcactttgggaggccgaggcaggcagatcacgaggtcaggagatcgagaccatcctggctaacaccgtgaaaccccgtctctactaaaaatacaaaaaattagccgggcgtagtggtgggcgcctgcagtcccagctactcgggaggctgaggcatgaacccgggaggcggagatggcagtgagctgagatcgcgccactgcactccagcctgggcgacagagccagactccgtctcaaaaaaaaaagaagaaaacattaatcattgtgtgcacagacatagctactccaaaatacctaagtcctgcttgggaactttcttctggacttttagaccattcttggcaatactttctcaagagtgccaaatctcattttgagtatggaattgaatattagatacaggcacagtatattcagagtcgagcctagtatataacataaaccaacagtcagtgtaaacttttctgtgaaacgcaggacttgattttctttgatgtttgtgaactgcctacataaagatgggtagtaaggaaagggtgaatgggactctctccaatcattgaatgaatgaaacagaatgtcatggaaagaatagagaagtggaaaaaggtctattttctaaaagatactttgtatctttaaatttccatatgccatatatatgccacctaacagagtggttcttcgggtagcaattggctagggtactgaggaacactggttgattgccatgtcaaatggactttaagttaacagagatggtagaatttttttaacctctccaaatgatcacataaacaacaacaacaacaacaacaacaaacagagcaactacatgacaaaactaaaaattcagggacatttacagaaaaactaggtgacagggtattcccaaaatatacataaattcacacacacacacacacagacaaatacacaatgaggtctatgtgtgtctgcatccccagctccgtacttatgtaggcagatgatgttggcctaggaagaatggccaaccctggaaggcaccttgagtgcccaggttgtaatctgattctaggcttcagccagaaaatatttaaaatgaacatggaatattttgtcacaccgaatagaaaggatattatctagaactacgaggtattcaaaaagatttcagaagccaacccgaagaggttcccactgaaaaaaatgggacaatttgggcttcaaaaaggattataattgcaactgattgaaatccattaaatatgtttgagtacatgtgtttataatttttttcaataggacaccaattatttactctgaaagctgctaaataaagagaaataatcaagcatttatactacttttcctaaacaaattgtaacactggtaaccaaataagagataagagaaagcattactttatacatatcccacctactgaatgaaaaaagagaagaaaaacaacaaaattacaaatcactgtttttcagcccccagtgattaataaatttaggtaatgaacgtcaacagttgctaacatcacaaaaagagacagaaacaaacattatgtatcttgcaatgaacaatacatcacttataggtgccatagggatagaacctgagtctgattaagtctcgggatccagtagccaatttgcacaaaatgcaaagggcagaaaaaacatgatgaacttctccaagactatgcaatcttcaaaatccagacactggaaaaccatgtacatcaaatgccctggcatcttcaactaataaattgtaggaaaaataaaatgaaggaggaactttggagtacagacttaaaaattcatccataatttttttatgggtaaatgagcaagactaaattgtagtaactaagtatacacatttatttaaaaaaactataataaaataaaaggaagtgatgactataaaactcaggataggatagtgattacttttgtgggaagggaaggggctgagataggaacaagacacttgaagggctttcaggggttacgttacaagttttattcttgaccttgcttatgtacttatcgtggtaggctgaaaaatggccctgaagatattcaggtcctaatatctagtatctgtgaatgttacctgctatggcaaaatgaactttgtagatgtgattaagttaaggaccctgatatgggagattatcctagattattcaggtgggccctcaatgaaagcaagtgtccttggaagcaaaggaagaagaaggcaatgttaccactgaggcaaaatgctactgctggctttaaagacggaggagggtgctcagcaccaaggaattcaggcccaggagctggaaaaggtcatggaaacggattcttccctagagtctccagagggagtgaaaacctgtccatacattgtcttacacctagtgaaactgatcgacgtttgacatccagaactgtaagagaataaatatgtgtcatttaaagccatcaagttatggtcatttgtcaatgtagcataagaaactcatatactcgttaaggtctatatttttatgtgtttttgtgttttcttttgcattaaaatgatatagataaaaagagagagagaaagaaatttctggtggatggtctcttctagaaagtaatgaatcaagcagaattctttggcggctgtagaaacaggtggcagaaatatcaaggaagcctttcacatatcaagtagggagctgaatcaaaaaaatgtttaggtttcttccaacccagaaatcttatgattttaaaatcgaaaatagtaataataattctgatttttctgcttaaccatggtgacaataatataactttccatgtcagagctctccattaagatactgttagtttttttagaaggcctgttttccttatttcttgctgtggctaaaaagctagttttctttgacatttacaccagccacacaaatcactctgactgtatttatataaaatgttgaaccacagaaaacctccatggtcgtggttgtagtttctttccttcaggcttcttacaagtcccaaattactattaatattgttatgtttaccttgcataatgggatttacctgctaggtcttttctatttttctataattacttaaggccttccatctctctctccatatcttacacttttccagggggtttttaactcattttgctacaagtcataaagacaattatagtatactgggtaagtgaatgttgatatcaatttgggtggtgaatagttcaacatttcaaaacatcatagatgatctgcaccatgctaatgacgttttgtaacagagctcattatcttatgctataatcatttcctggaaataagcaactgcagagtattttatgtgcttattgcccaggtaataagcacatattacccaggtatttactcaggtaaatacctttggaaggccaaagctatttgcagcaaatatttctgatactatgccaagacacagtgaccattgaacatgaaaagaaatatttaagagccagcttttatgttttttacctaaaaattgcaatactgtaatatgtttaaaatttaagggttgtattaaatttaaaaaactcacttccaaaatatcttattctaaatagaattaaaataatccagtaaaggcagccttgaataaaaaccaatgaaaagtaaactaagagatgaaaagttataattttgatttcttatttacctgatagtattacttatggtttgttctgggtaaaaattaggaacaaagctctacctgccacacaaagcttacatatattcatttctcataaaatgttataatttcttggtaaacatttcatgttcaattttgtcactttcttgggtagttttatactcctctaactccaagaagatggcaagataaaggaagtgggcatgaaattctcaatcaaattaaaaatactaatttaggctcccagatgtgaaattgtaatgggtaaagtcttctgcattaatccttttagaaacatgtatataattatttgtggaatagaaatagctcattgatagcaaaggacagaaggtcccaccttctgcctcataatagccatgcatgattatcagctttcttcgcatacctgtgaaatagtactggacatgcctactgcacaggcatgttgtgggaatcaaataagattccctagaagaagcttaaaaaaggaaatgtctacagaaagattctgaaaaaggataatctcttgaccagcagctaaaactatctccagaatatcaaatcaactaatttagtcaaaattttgtaaaactggctaaggcccagttttactttatacacacacacacacacacacacacacaacacacacttacatatgcacatatatatacatgtatgaaaccaaactggccacctttacttaaaagtaatcaatctaaaattttcaggccatttaagggatattagacattatttaattcacctgccttattttacagatgagaaaacagttatgtatttaagcgatgtattctcaaaggaggtgaaatttggaattagagagtagaaaatattcctctttttaggtaaaatgcgtatatataatataatatatatatgcatggatgtgtgtacacgtatgtatatatgtgtgtgtatgtatgtatgtgtatatatatatcctaaatagatggcattactatttcatcggggggttattaggaaaaccatatctaaaaaggctcccctaatggagtgataatgaaaacacactaagtcaaacctatatgagagtccaaatatcctaattaaatatggtgcccattccagtatcctacagcaatcataaactttctataccttgaaattacacaactctgcatacataaccatttgtccttaagaacaacagaatgctgtcatgaggttgttagagttatttatgattttaaattgataaccaaattgttatttgtagcttgatatcaataggtgctattattctggaaataatgtgtagaagtaaaaaagaaaacttgacttgaaaaatgtttattcttgaatggattggactcacctggcttcaggctggggtggggtaggggtggcaaagactgtgatgtgagtggcagatttagagattgaagttcttatgactcgagcaacagagaattgtcagactaaagtgattcattagcttaaactgcttttaatcttatagtatataatttcaaacaaattcttaatataagaatcaagagattcaatgaagagaaataaatcctatcatataatcttacctaggtgcttatagaaatattttactatattttctaatatataaatgaaattaattatagaatcatagaattccagaatcggaaagaatttgatattagtcaaacctcgttatatacatgaaaaaactggggcctcagaattacaatattaaaattgtgacctagagttttcttttaaaattcagttgcacagagatatatcagagatgtaataattactcaagaggttgttaatactaaaaaataagagaatacatagcttaaatgagactgtaagtttcttatcttcaaaagtaattggaactattatttagggttttcaaagatttgaatgtgaaaactgcagaattataacagttcatgacatattgttgttttggccacacacacgaagatagagtttccagtgatgttctggtgttataagtattcctgaattcacttatgacagaaacaaagctataaaaatatgaaagccatcattaggaagccagttgcctgttttccaagcataagcacaacatttataatgattgaataaagaccaatgtttaaaataagctaaaatttaagtaaatgagtcaatggtttttaatacctacagccatgtaggaaaagctaagatacctacctaaattacactgaaatagattttcatttttgcacaaaaagttacttatgttaatctggaattcctaaacacacacacatacacacacacacacacacacacacacacacacagagagagagagagaaacgacaaaaaaaatagaagccctttagggtgtctaaagtattaaaatatttttatactgatatgtgtatgggcagtttaaaaaacctacattggatctaagcaagtttgagtctacattcaatcttggatctataactttattgctgtgctccaaataacagtcaaaaatggaataaaataacatcatattaacaatatcaaagaaaatgactttctgagttgtttaccccaaactaaaatgatggggcttgcaggttaggtgggtgaagaaaaggccataattacacaacacagtagaggtggcacaatttggagattaaaatagtccttagagttcttaatcagttattctttagtagggactctgattcaattgatttttctccgtattgaggggctaagtcaatgatggaatcacctgcaagaatattttgggacagagacttttttttagaagaagcaatgttactcaactaccatgataagagaagaaaggagagcttattgaccatttctgactttagacatgaaaaataaatgaactaattctttaaagactttctaatcatcagtcactgctgtgaggtagtcacttcctctcccagaagtagaatatgtggattaggacgtttatctatcagaaatattaatgcttatacttctaagcaacagagacagaaatgctgctactaattaattcagttactctaaattataatagtcataaagtacacatccaatatctaaaattatacatttttagcaattttgttgataaagttttagcattgctcagcattcatggttagttaataatttttaaaagcaatttgaaacataaaagatttaacacaggctttagtatattttaaaaacaattaaccaagtaaatgttttaaattagaatcgtttcatgattgccaaataaaaattcttcccaaaaccactgttataaaatatttcatctcattatgagagatggtataatgtgaagtccatacaaactaataaatcctcagaaaatttctaccccatctctcactttgatcttctggagagggagggcaggggattcttcagggttcataataacaatgtcatttgtcataagaaatcatattttataatttcacaggagcgtagaagaagagaggtgcatggtgtggtgaggaagagggttatattcacaattaaaactgtgaaatgctaaactgcattatgaagacaaataggaaagtacaactccattgttgaaaacaatttccctcctatcagtctaaggattcatgcatcaatattgtagatgaactgttaattacaaaatcaattaaaaattatttctaaaaacagtcacgcgtccctggctctcatgggggcaatttgggcagaaggtctcatctcactaggaccgcgccaaatcacaaagtcgtcatccacaagtaagcaaaagcaatctggtttttcatttttcagcgcggctgagcccagcctgagattgatcgtcacatatggccccagaaaacaaactgtcaataccttgaatgctgcagaatttgaacaaatagccgtccgcccattcaagccactcattgcatcccatttaacagattttattgacagtttccttcttgtaattaaagggaaaactactggccggcaaccaagataaagttcaaagatagggtcaaaacaaaagcagatggaggggcacggtgtgactgtcagtggtacatagcatcagagcacgttattgacacgcaggtatctaatgatcggcacgtcattaaggagggatctatcctgaactttatgcaaatgctaaaagagacttaagaccataataaagcattaagagaggcacaaagggaaaaacaacaaagcaccaacgatttttacttattagaggttgctattttagcatgtttcagttcgaatgtaaagaccagttattcccataattcttaacccttactgcataggcagaatttgacttctaaagaactccagaatgtaagaaaactgttctttgataaccaaaactcaaagcaacactaaatatattttcccaattgcacaatttgcatttttgagggaaaaatggtttgtgtgtatcaacaattcccttgttttaacttacgcataaaatacaatagaaataattttgtcctgggagtgtccatttatgctattactacaagagcttttgctttgccatgatccaaattagtacatgcattagttgataaaagtttcaaagcattcaataagcaagtcaaatgaaattaattccctttaagtatatttttcttatttctaacttttcactagaaagctatactgattataattttgctgactcatacaaaatttacaaaccaggtctagcaaatccctaaagaagttaaggagaggggtaaaactgacatattaaaaaaaatgtaacaatgactatgtcagtatgccaacctgaattagcaagagctatagctttgagggtgacaaattcttctttttccagcttcatgctcttgtatttctttaccagctgcaggatagcattatttagatcaagaaggcctgctaatttggactggtcttcgtccattatataatcgtctgcatagacaagttcatcctcaaacgaaagagaccggtatacgacaccaaggatcaaaatttccatccaagcactctgcagaaggctcatctggtccgccagggacagcgtggagaagcctgcatggaaagatgggcagatcaagttactttaaagccataatttcataatgcaacattagtttcatatggtagctggcttctgcatcagtgctcaaaattatgctgagctttgattagaagctcttaaaattttccctggatcactttgcgaacagcaaagtgaaagtcacaaaccagcttcttcaatttgtgggtatttgctataagttttatagacacagcttaggggaatataatagagatgtcgctttctttcattcgagaagaaaataccatgtaatctttaaatatacttgatttctggttgaagtctttaggaaaatcttacaggaagtcagattttcaactatctcatctctaaaaactactattggtaaacaacataaaagtaaaaaaaaaaaaaagaagaagaaggagaagaagaagcagctaaaaataaaaggtaaacaaacaatttaggccatagagctcagcacaacttggaaacatttctgtataatattaataattacaagcacaatggatgatgagttacaaataggtgagccttcttaattggctatttctccccactgatatttaacatgactttcttttaaaattagtgataataggtataaaagaaagtgtaatatgtagcagcctggcctccccaccaaagagaaaagcctcgttcactattgttattaagctccaattatttaaaaagttaaatataaataaaggtaacagggtttggtgcaaaggagtcagattctgaatgtaaatactggctccacttagctactggctctttcaccttgagcaagagaaattaacttgtctcttaaatttcgtatttgggaaatataaaatatcacctacctaaacattaagctataacctgaaattcagtaagtgttgttgtatgattaatatatgttctttttatctgaattacctatgtgatcaattcttttctgcaaatctgggatgcattcatacacgcatatttaaagtccctctgagcttgagaaaacatatgcaaaaaaattaaaaagaaaatgttgttcaatagagaaagaggaagcagtacaattaagcctacttaggagtgaagatatatatttatatatcagagggactagatctgtattctaaagtgaagatacctgatgatcagaagcttttctcaagtcctaaaaaagaaatgtttcttaaaacttcacttttatttccaagtgtatgcctaagacttctaagggtaaccatccacctcatggcttctgaggacagtggtaccatcatttaaggtcctgccaccagtaattctacagaaaggaaggaccatttttaataatgcaacttaagaaatctatttttactccctttctagacattattatccaaatcataagtagccactgatgcccaacctttttaggctgctgcttatggtcactgttgctgtccttttcaatcatatcaaattgtgggtatcccatatgatattagaaactacagcacagtaaagaaaaggaaaggatttcctgacctattggtgaaaaacagtggtttgccatttggtaccattaattataagtgcttaataaaatcatcagaagagatgagtcaagcttttcttaagggaatctttaagatatgtgtaaaatgcatttctttcgttgtttatcatggtgcttacatgttatttgacaggatttcttttggactggctgtgtaagtcttgtttcttattctgcttttgtcattgcatttggggttaaattaataaatatcctcttagagatataatagctgataacattttaaacagcggttcaacacagaaaactaaattatttaacctaaataggttaggctccagatgcttttaattttagcaatgttatattcacaacaaacaaacagaaaaccacactgctcttttttctattcccctccaaggaaaaaaggtgcaatgcaaatccaaatatcaatctcaagaaaacatactaagtaagaatttcttgtgtaaattaaaataccaaaaaaaaaaaatcatctggaaagttaggagcaaaaatgaatgggtcttttcaatttgccttagttttcttgttccttttcatgctcccaagtcgcagtttctctgcagcagcagatggacagagcgtgtagcccgcagcaccttcctgtgacagccctattctccctcccagacactgctgttagtaaatagatttacacattctccaatctccacacatctttctgccgaataattaaaagcaggatgattagtttattgagtggaaggaggaacttttttattgaggtccatccacgattttatcagggccagcacttttacggttgtcaggggggtgcaggcatccaatttttcttatctgcctgattaatacaaacgctgtttcaggacacattaattaacagatacaaatctacgttctcatggaaggatcaatacggagaagaaaagaggcatcaatgtgaatttagtgctgatgatggagaaggcacgctagcgacatttacgtgcacggaaactttaaagttgcaccgggccccctttgtccctgtgatttacaaattaacaatgttacagccataacaacatttcgcacatttctttggggtttaattgaacaaaaaacaataaaatttcatttttaaagttgatcctgcaatttgtttcttctatattgatggttgtgtgtgtgtatatgtgtgtgcatgtgtgtgtgtttatccttcctgcaaacctaactttttccttttgcttctctatgaaataaagagaaggaaaaaaggggaagaaacagctctcctttttttttttttttttttttttttttttggtgagggagcatgaggagacggatatagcacaaaaggtttgacacatttgcttgattgatatcctcaagtatatttcagctgattaaaggaagtatactttttgcaaatccaaaggaaaaaggacaatctatgccttacaaaataaaataaaagtctgaacttcttctatcttttcttggtctagaaattgctggctctcattttacccctttcctaccacaccactgcaatctggaagctagtacaaagagctctcctgcccaaatgcctgagcagcagttaagacagccttgttataagatagtcatgttcatctggtcactaaggagaccaaatacataatagaaattttatcttaattccataaaattattttaccttttctttaggagtactagctacgttgcacatacataaaaacgcatggataaaataacatttttatcaatagacctgaacaatgtataaaattctaaataaccaaggcctaaatgaaaatgcatgttttaataagctgagtctaaggaattttcttaaaacataattgctctattggcttacacatgcttgtatccaaatgataattacttgtttatgtttataccaggtatttaatggtagtttatagctcttgggctacaagttagaggtcttcatcatctgtaatatttagctatctttggagagaaacctctttcccaagtgaaataaaatatgctttgcagttgtgtcgtttgaacttcatgttttgtacatcctgggaccttaatctttggtgtgtgacaggttatagttttaaatgttcagccatattacagctttttaaaatgcactgataccatggcacattttttcttccacagctatagcccattccctgcatatcgctgacaactcggatctctcttcatctctgtcccagagtcagtgccatttaatgtatctcaggcattttgcttgcagaatgactctctaccttgacccgcagttaaatagcatgtttatctgcaatacagtgtgctccaaataaaccagatgacagttgggaataacatcatttggaaggattgaaaagcttctcaagaggcaggtacccctgaggtaataggcttgaagaaagcatgttttgtgccaaccgtcttgccttcttctactggaaactttggaggttgacagtggtgccatgggcactcatcaagcactgtttttttttttgtttttttttttttttagcctggcaaactgatgcactttgcagtcaacttacaaaaaaggctaagcatttgaaagtgtgaagggcaaaaaatatctgacggctagtcttcaaaaatacactttcatttcagaaagcataaatgtttatttcctgaacagagtgttgacagaaataggctgcagtgcaggcatttgggtttaacccctgctaggcattttcttctcggctgctttcttgaaatagagagcaagcattttaaatcttcagggcatctgttaatatcagttaatcatggcattgacttgcctgatcacagtttttgaactgtagtttttctgttccacaaaaaaaaaaaaaatcaacatttttcaacaactagcatatcatgctagaactgtaattatgccataatgactcactgagatcacaaatgaagttcattttgagaagctgattaagcaatgcaacgtaagctagattcttttctttcccgtacaaataaacctaatgtttacaggacccagagaagaaaagaataacagtggcactaacatttggtcttagctaccaatagacacacagatgcataacccttgctagagataaacttattttgtatttttaagccagatgttcttttcacatatggggcagacatatcactttgtcctatgattcacaaaatacacagctcaggggcttgtaggaaactttatatatatatatacatatatatatatatgtaagttatatatatatatatatagtctcttgcaggagactatatatatatatacacacacttttttttcatgaactggaactcagtaggagctagagttaagcagctacagatggttaactgcagaagtgaaagctggaacatctacatggtgctatcagaagcattttatttaaaatttttctttaaaagagatgataatgattatattatgtttgtacttaagccttaaatacaatacctataatactattctttgaatctttactcttttgggctgaccttaatccagatttcaataatttagattcaatcacaattgggtgaaatgtaagaataattgacaaaaatggaaaataggtcccttgctagctaatttagtcatttgtttcaacatttgttgattccataagaaatctatttctttatctctgtttttatactttaattaggtttcacattgattttatggaactattattttaaaatagtggtcaaacaagacaagtacatattcctaaaatctaaaaggcaggactcaggttttaatacaattttgtatataagggcagaagtgaccaccttccataaaactgagcaaatgatctaagcagttgtgaggaactaaaagagaggagaacagaaacgcaaaggtaatatctaccagtccaaaacagaattatcactgttaactgaatttacaggtgcaattgaccactgactactcatgctgattacataaacaaccaaatgagtttacaattagcccaatcataggaacagaaattgaaaacatgcccccatagacgtggtgaaatgctttctttagcaattattcctggttttccaatcagcttgctagaaaaatttaaaatacaatagcagctaagaaaaaatatttcaagtgacaatacaggaaagactcaacatgatgacaagaggttttgttttgttttgtttttttcctgtgagtgggagttttttttaacaactgccagcctactttgaaaagtactagacacagggccaatgaatgcctaataagaatgtaaagaccatctacacggagtgtgcagttcctctttggaagtccttacttacccctacttacctagtacttctgaatgactggagaggatctgaaataattcccttagcttttcccaaactccctcttacttgacctcaagtttacttcttttgtcctttcatctaagccaagaagaaagaaaaaatgtgggggggcatggaggcaagtatgggctgagctgccttaagttaaagagggaaatctaatggctttcttttcctacaacctttattttttactagttgaaaataagttctgcctggaaagcagactgactgaaatttgtttggccatcaagaaaataggaaagcaatgccatataatataggactctaaaaaatatatttaaaaaaggcatttttcagtctaactttgggattagatggatactgaatagggaaaaacaccatttggaagccacacttctgatttgaaagaaaaaggatctatgcttgaatctgacttgctttaccaatgtactggtagaactaggtcaagaaatatcagagtgcttcagggaactgaccagtggtccatagaaaaccagtcccactttggaaccagatatctaaacactatcctcttcaggaaattcccaaggggtccccatcaaatttggtctaataatttaaaattcaagcctccaaaataaacacatacaggctctatcttgaaccttggagaaagctgacagatatctccacaagcctttaaagagtctgtggaaaacatttagcaataaatgcccgtaagataaaggtttatagtcaggaagtgatgtctgaggggagaggatagtgaggggaactataactttgaggtctagagatctgactacaaccaatggtattaacttagcccctgtgatgatctgacttgtgccatcccacccaaaagatgttagagtcctaacctccaggacctgggaacatgaccttatttggaaatagggtctttgtagatgatcacattaagatgaggtcattaaagtgggccctaatgtaatatgactgtatcttcataaaaaggggatatttggacacagagatggacgtgtgcagaggaaagatgatgtcaggacacagggagaatactacctacaagccaagggatgcttgaggccaccagaagccaggagagacaggagagaagcatggaccagactagcctgcagagcccgcagaaggaacccaaacctcctgccacctgctcttgggcttccaacttccagagctgtgagccaatatatttctgtggtttatgtcacccagtctttggtactttgttttagcagctttagcaaactaatacagacccacaggtgaccttcttatctgtcaattgcaaactgtggactacacacttctgaggaatcttccagttccaacagtttctaattcagaataacaaaccgagctaatcatgaagcacaaggctgtctgggtaacggtgagcacctcagacaaaatccatggactgggagtaaatagacctagaattgggtgccatctctgccaccaaagaactgtgaaacactgaggaatgactcaactttgctggtttctgctttctcatctgtaaaactagaaggtagaaaaagtattcctgaaggtttatttcagccttaaattattaggcttccaatggttctactgtgacaaagttcaaatcaactagtatttagagtatctattacaagtgaagcactatgttcagtaccattggaatatgcaaaatgaataagacataatccttgtcatctaagattttatagcacagtaaaagtggataagaccataacaaccaaaaaagaaaagtattgcaaggatggatccaagtacatgtctatgcagaaaaggagagtttagtgcttggttgtacacattctcctaaatgtatccatatccatcactttctctcctcccctccattccagttttggttaggccttcatcatccttttggggtaaattttaacagcatccttaccaaaatccttttatatcttgtatttctttcttccatcctacccagggctagtcaagcaatctttaaaatatgaaacctatgccattccctcatcaaaatgctttctttgtttccatatctcctacatgataaaactgaaactctctggtagaacacagaatttctttcattgtttgttccttttcccttttcctgccatatttcctaaaaaatcttcctctagtaattcctccatggatgtcctaacatgttaagtgagctcattttcctaatcctaatgtcaaaacctacagctccactatttccctaagcaccgccatccacctgccaccttactcttggcccttcactgatctctcaccaagttttctcttttatacatgtgaaatcattctcaaatacacacacttctttccattctcattgccatgatcgttgtcactgggtagcatctaagggcacttgtaaaatataaatgtgaagatgaagatgaagacataagcaggagacacagagctgagtgtaagtgacccctgaagtaagggagtggatgtgaagatctgctgcttgatagatgtatctgtatcctctggacagtggtttgctgtgttctagataaactcttcagggtggagatctctgatttgtttcctgctatgtctccagctcctcaaacagtgcctgtcacatagctggcgctcagtaaatatgtgctaaatgaatgaatagagaattcctcaacagctcattgactggctttcaaaaagatgcgacgttaggaatgaaaagaccattgcaggaaccagatccctcacccacagaaaatacatcaacatataacaaaaaggggtgcctaatgctttttcattaattcaatgaatgtttattaaggcactgatttcgtataatgctcttttcttataagtgcctataaagtatataggatttttatttggagccacttagactctgataaagtcctgcctaaatttattaacctcagccagttctcttcaatttagaagtaaagttgatgtttcagtcatatggactagctgcttctcttatatttataagtaaccattcacaacagacttcatgataatgtcacaattacttttttgttatttataagtactgtcattaatttatctacctatcctagttgtacaattattttgacaatatgtatacatttatgttctgtagcttgcattttaagcctctgaaatactaacctagtgaagtcatggatgaaaacaatgctcattgcttctttctacttgcaggaataaaatataatatgtctacttttttaacgtaaatttttaggcaatcccaacctaatttttgtcaagtgtaagaaggagcttctcatgagaacattttccacactaaaaaacttgcaagaagattgagaaatcctggcattttatcattatgggctgcttcactctgaatcaaaaacagcaaggaggagacaaggcaataaaaatgcatacataaggcgtccccttctcagtccagtttagaacaatgggtcctcactaggtaaacactcacttgtcagaagtacttgcaacactacagtcattgcagcaccaagggagtaagggcccttcctatgataaagcagcagattagacagttacaaacagcaaggagggttcttgtctgttatgtcctttcactgtgtctttacacacaggtgttaatgtaatttaaatgccacttagacatgtttcaggtttatcagactagtttgtgtatccattcttacataataatttcaaacaggaaccagttctacctgctgtgggaacctgcataactatagatagctctatgcaaataatctgggcaagtcaagcagaatctatttaaatctaaaagaaatcaggtgggactttgaggaaatgaagcaggaaccaaaaacattttttaataggtcagaaccaggatcacattattttgatatgaactttgtttttccatttatggctggctgagagtttggattcatgagaaaattattctgttaaagattataatttttcattgaaaatagagatatgaggagaaacacaagcagatgaattttgtgaatatacattttaggatcaaaaatatgctttttaagtcatgcaaagttttaataaactaaccaatatgttattactagaaaatgtcatttgtcgggcttcaaaaagagataggcatgcctctaaaactctttaaagctgtcgaagaggcaatcccagctgtaatttttggttaacttttttcaaacaacaaattattggcacttctgccttcctttctactttttaagatttgattttcactatttctaactcaaaaatatatttaaagtataaaatgaatttttatgaattttcattttcccacacgtgaagtttaataataatatttttaaaggtgaaatgaactgcttttcttgggaatatcccacaattaaaagaaatttataattagtgacttagcttgccaggtgcggtggctcatgcctgtaatcccagcactttgggaggcccaggtgagtggatcacttgaggtcaggagctcgagaccagcctggcctacatggtgaaaccccatctctactaaatatataaaaattagctgggcatagtggcatgggtatgtattcccagctactcaggaggctgaggcaggaaaatcgcttgaacacaggaggcaaatgttgcagtgagctaagattgcacaactgcactccagcctgggtggcagagcgagactccatcaaaaaaaaaaaaaaaaaaaaaaaagggggtgggggaaagaatagtaactgccatggttgcttcatttctgttatttgtaatccaacattagagtctaatattgtaagaaccttttaaaaagcacattccacacactgaataaattgaaataagctgtagtgaattaacattaaaatatagatagatatattaaggtctatctatctatctatctatctatctatcttcactgatgtagtacaagagacaaaactagaaggaaaagagaagtgctcactggaccccagtctgattttggattaaacactgcctattcaagtaaggtgaaagttcaaagtttttcctaatactgcttgcattaatgaaggtagagttgctggctttaaggctcagggtatcttgtcaaaaagatctttgtgtaactgttttcccgtttgtgaaggcctcacctacacgcacattaagcacagaatgacaggcattgtgagaacctgggtcatttcatatgggttaacctaaaaatttgaaaattgtatttaagctgccacgtacaaaagggagttgtgattatcttgtgtactttcactgaaatgaccaagaatcaattctatcttggatccctaaaagaaaaattgcttataatttctgtactgcctttaaaaacataacttcaaatcctttcagagttacctaattggtcccttgatatagaaatacaaattccaataaaagcactaattattatagacttggtgtttgtggagttaacgctgttatctcttcttgtcttactattactagttacaagtaaagcagaaaaaaaaatgaaaatccttcaggtgtgcttttctcaattttcctaaaatagaaactataactcagtgtctttaacatatgccctaggaggaggagaggcagaaaaaacaaaacaaaacaggaggtcttctgcataaatggaagttaaaggatttacagcataggccattaaaaacaaagtgccatatgtattcatgaaagaacgtagaagaaatatgttatccatgagatgcttgtcacagatatgaaattatagcatgctgaccctgaaactccacactcaaataatattagaaatccttactactgatgcttaaagacctaggcataatttgtgttctggacagcatggaaaagcagcttctctgaatttctagctctgagagttcggtttaaagtcaggctcccacactgtttttctctgcggctaatgaagatctgtttgtgaatatttactcccaagttcacggctcgtgtttgctggctcaagcagagctaagtcattatggcttggcatacgttccactggggaggcgaccagttatcttctcattgacaatagaggcaaccccttcgattcctctcagccctcccttcttcctctctacactatccccagtttggatgactagccaagttaaaatgaaaccaaaacaaaaacatcaaacaacacagctctcggaattcctcaaccatatgaatgcagaatcattatcagtggtaaaaggctgccggtggtatatatttactatggatatatgatacacaaaccaaacctgtgcctcttataataattctttctgtgaagatcctccattcaaagtagaatggagaaggcaaatgtagctgcagttaaaagccataattcttctcctccccaaataaacaagagcacccacagcagtccctctaaccttcccgctttgatctgctggagagtgcatttacctttgtatcccacctctctcctaggctgtgaccatttcctttcatgtcactgaaaccctgcaaaaaaaacccaggaaatcctagaagtttttatatcaggttgattcaaggaaatacgtgaaggaaaatacaagggttaccatatttggaagttgtcctgtttcctaactagatttgagtagcatgaacattacctctggaggcagagactcttctgtctacaacagtccaaaatgaaagggggagaagaaatggaggaaaaaaaaaaaaagctgcctgattctaatacacctaattagccatcggcagactcttaattgcatacattaggatgatgccatagtggagattaattctaaatatacccaagcagctggttaagatgccatggattacagtgtggactgtacttttccacttaattagatatcaaaattaagcagcaacaagcattttgacataacggggatcaagccgctgcttggtatcccagagctgcactaaagtgaccgctaaacagagctgcacagatggagggatattaaatgccgcactggaaagtaatttcaaataataaaatatcaatatttacattttaattacccctactgagagctgctctgtcattttcactattgccgacgcagcaaggggtagtggaatgacattgcggctctggccgcaatgactattttgtttccattaaagaatgacaagtgttttacaggcagtgacactcggtgtgtgagtaagaatgacagcagatcagaaaattcctattaagggactaaatgcctcaacaagagaatttactctgagcaccagctcctccttgaagcacataatcctttccaaattttctgctgaaagtttattattggggaggcccaagggaagttttagtctcccatgaaatatttagatccgtaaaacattatatgatgattgtcaatttaaaaacaataatacttgacgggaacaaatatccagaagttatgtgtaaatcacaacgaggttgggggttttcttttttcatattctctcatttaaattgacaataccattgatgatgtttcctggaagcatatctatttcttaccgagtacatggatgaaagctcgggatacagcttagaataattataataaaaatattggacttgttttcactatcttttctttagcattttattgcacctgactagctcaattataatttccttgatagaaaataaagtccaggatgggttataatttgtatgtgtaaatgcacatccatgtgtataaatactaaatactttagtttctgttattatttaaatgtagcaaattcctagtggcacttacaggccctcaccaaatttaattattctttatggggtgtgaagatgagatgaaaaaaaaataaaaggtatatattagatgtgacatgctgcattcgcaggataataaatgaaaacggtaaagtcttcctttggggatgcctgtcaaaactgtagagatcttgaaagaattttaatgcctcaagatatgagagagtgtataagaaaaactccttggtcagtatactatagtaggcagttaactgaccccctatctcagagcctgcatttatttaatgtgtagagatgaacaaccataaatgtgataaatggctacagcaggaggcagaatagaatttttcaaagaaaagaaaagggaagttggggagttctagagatccttagctgcctcttttactcccattctttttaaagtatcagttttgaagttgaaataaaaactcgataataggcagggtatactaacgcatgttccctaactagcggatgttcctcttaacaaaaaataaaagtgcaattggaaagtatttcctaagcatccctaatgcttttaggacaagacagatcccatttttcagctactagcaccttttaatttctgaaagagccacggttgaaaatcttaattaattgttccatactgcttcaggatcattatgcaatgtaataaaggccatgtaattatgaaattttacagccattatcaaggctgatggctcgtaattcatcctcagctggacccaatggcttttaggcactaggctcctctttgatgaactacagacagatctatcaggcccaaacaatatccaggcgaggcagctataatagctacctacagatgaagccatagataaagataaactataaatctacacacacaaatgcaggcacattgcctggggatgacagaggagagaggatgagacacttgggaaaggtagttgctcccacgaaggccacctcctgtgcttctcgctcattcactccagaatggggtggattttataaaagacagcaaaaccccagtgaacatctcatttattctccgtatctcgaaatcaaatgagagaaggaaagggtgtccatgagcattgtatttagtgcattatttaaagggcagagactactcagatatcctaatgtctatttcagtagtgaaagagaaagctagatatatgagatgttattcctggcacatagcactaacacagcaatccaaaataagtactctgagacaaattcgattatagctcatgagtatctctttcatggatattaatatctttaaaacaataattcaagaacaacaaaaattcatgctgaaatgtaggcagggaaaataacattgtatttatacataactaaaacgtttgtagttcacatgtattgactcattttggaatgtaggagttcatgtagccgaataactgatgcaactattctgcttaacgtatttctgacatatctcttttggtgaattaagcatttccataagttgttttacacataaatgtaaaaaggtcatctaggaggttcgtttgacaaccgtaggggtacactccagggaacatctagctcaactctgcctttaggttgtggcaacatcatggagctgatgccctcggtccttttgacggcatcagcctcatgttggctcgtttcacgaatgcgaccagatagcttgtctgcaatgtggcttatcccaaaggaaaagcccatcagtgggtcaatccaagtcagcctgcaaactgaaatgatggaccatgcagagaaggcaagaaaagcagcaggatgcatggaggctgagtgtggggttgatgactgacagagagttagggtgtatgggtgtatgtaagaggcaagggtgttcataggcaaaagaatgtaatattggttgaagtgacatcaagtctccagaaagcacagcttgagactgttcactgaaagtatggattaagagtgagagaagctgacttcagtgcaatctcagctactaactagctgtgtaaacttcaggcagtcactgaattgctcaatttcctcatctgccaaataaggttgctagactggatgatgctctctctggtctatggtatgctccagactaaaccttccactgaacatctttgatgttcctcaatatgggcagggaaaacatgaatccaaaacaagcctttcctgcatgaatggacagtcttcctgcccgaatcaaggctgagtgtattttatcctgcaaacatgatctcacctcccatattttagataaatgaaggacatcagatataaatacccttgacctacttcccttcttgtctgtagcaggactaattcttaacaccttctcacttgtctgtaagttaaagagactgctctttcttcctaaggaaggcctttcctatgttctcaatccatctgctctggccaccttgaagattttgatccaccaattttctacttggcccctctccatttcttatacttataatctctccttctcctcaagttccattccttcatccctctattctgataaaatcttacttccatactggcttttccccaatagctagctctctgtctctgtctgtctgcctatctgtttatctgtctttttccctctctgttcactgcatcccttcaccacgaaaattcctgacaaaatggtgtacatgcacttttgcactaaattcatctccattccactaaagtctggattgcatctcagctctatcatactgtaatcaccaatgacctaattgccccatcccatggcctgttcagatccgatttgatctctctggactattttgtccagactgacccctctcttacttcctgaagctctttcctccttttgcactgataagacatctttctcctggtctttcttcttttatgccaatccttttaatgtaatactttaaataattctgtgttcacttcttctcttcttcctctacctgcccatccatacatatctatggatgtaacaaaactatatcaccagtacccccttctccccaaagagcaagcctttatatttctggttttttacaggtcattcccatcaaaatgtctcattggcaactcatatcaaaatgtctaaaattgaactcattttcctcccagacttagatcatttttaaatactgaacaacacagagttgaaatttgggagttagctatgttttgacttctatgtctaatttttcctatgaaatatctcatttccaaaactaatttctagtcccactgtctagctcagttcctcattatcttccacctgaactaagtcaatagcctcccaacttatgatttccctgactcaagtctcttttcttctagatctgtattaatcaggggtcacctcttccttgttgtgatggtttctctctgtgaggtccacagaatccttcattgtcagggcccaatttacttttctttcttcattttttggtaagaatgatgatgatgacaattattattactattaaaatttgtaaaattcactgagtactaaattccagtcaccatgctagtgcttccatttatcatgagctgggcattatgaatgcaacaaaagaaaaatatggattctttggggccttatattcaaggggtggggtggaataaataaaaatatagcaggcagtggtataatactgcaatagagaaacatgaatacaaaactatgagggaaaatgggccctgggatggggcatggggaaagaggagctgctgttgtaagcagtgggagagggggtcaaggaaagcctcactggtacctgagctttgagcagagatctgaaggaggtgagagagcaagtcctttgtctatcagggtgctatagactgacagtttatattcctctaaaattcttagttgaaatcctatcgccaaaggtatgacattaggaaggagggtgtctaggaggcgattaggtcatgaaggtgaacagagccctcattaatgaaattagtgcccttatgaaagagaccagagagctccctttgccccttctccataacagagcatggtgagaagagagccatctatgaaacagaaaggggaccctcaccagacactgaatgtgccagcaccttgatcttggacttcctagcctctagaaccataagaaatgcatttctgttaattataagccacccattctatggtatttttgtcgtaacagcccaaacggactagaacactagaactttcaggcagagggaatggaaaagacacatataccaaagaaggagccttcttgttttggttcagagaattttacagaggctagtgcagctggagaggagtagcaggagatggtgctgactggagaatggggcaggcatgtcacaaaggctttgcaactttgtgcaaacttttgcagcctttactttaagtgagatgggaagtcactgggggctttgaacaaaaaggagacaggatctgatttgtattttgaaagctgactaggtatgggataggagtaaggcagtcaaaagcattctcactaaaaccttatggagaacacattattctctttgccactttacatttgaggaaactgaggtgcaaacccactccaagtcacctgactaaaattattagaggtatgatttgtaccgatgccatttgagaacttagaatttaaccaccatgcagcactgtttgtcttcctgtgttccaactatcattttccctttcccaaacaagccatgctgttttgtatttctgtgcactggatatttcttcacctttgtgtgaaatgccttttcccttcctttctgcaggcaaatacctcttaaacaatccaaacatatctgaaatatttttctctaagtatttctttaataacctcaaacagagaggcacttccttctctcctgctttctcctctactacttggccctatttctattactgcattgtgtcgacactactaaagtcattatctcttctatgatatcaaaatgtattcctctttgtaattctagtgcttggcaaatacttggtttttaaaaaattaaaaattttgtgtgtgtgtgtgtgtgcccagaacttggaaggtctcaaggacctaaattgtcttaattcatgtttgcagaattgaaaaatcaacaactggtgggaatggtcacatcttgaatgaggacaaaagcgtgagtctgtgagaagcgcttaagagcatggcccctagagctcttcctggcacctatctccccaccccactactgtctgtctttctgctctaatggaaagggaaatcagaacgtggtgaaacctttccactgctaccgcacagccagaggtgactcgggcagctgagtaattcctccagggaaacgcaggataagcctgagaagcttgaagagtttgagagagaaaacgcagcaaatgcatcccctagtttaaaaagaacaagctaaaacctcttaaatgaactctacccatcttcctatccctcagcttaacaccaagttactgctacacattcttaggtttacatctagagcaagcatgcacccaattaacagcaattgtttcaaggtaactctgaaaagttaaatgcaccagtatgatgaggttgcaagatgtttattaaataaagtccataagataatagaaaataagctcaggaaatgattttagaagttatcttatgcagaatattcatcgaacaggcaagggagatgatgccacctagataaacaaattccaccattatattaggcatgtcatgtcaattaacaattactctagcaagcataggacttaaacatttgttgtcatgatatacatttaaaacagattttgagatacatgcttatttctcaaatcataattctaatatttcaaacacagtctagaagatgaggaagaccattctagttgtataaataaagtctaacttcagatctttggagggattgctcctcagttataaggaaggaaaaagtcaacctggagattttatatatatatatataccaatatataccaatccacatcttagctaatggttaaatatatttgctgacaatttctttatttagtgaatttgaagaattttcatatatatatatataagcctttagtaagaatggcatgtccctgacatcacttgaaaatatacaattttcgtttggttgcttagtatggccattaacacataggttattatgtgagacaacacacttgaaaataccaggacagtcagttccccttcccccctaccttgttttcagccaccctccctgaccctcggttcattctactccaatcacttgggcctccttcctgttcctggaatgtccaagcacactcctgcctcaggacctttgtatatgctgtccttcctgtccattttctgtctccttcactagaatttacattccacaagagtggggattttttggttacatttgttcactgctggatcgctagtgtttagcagagacttacacatactaggtgctctataaaatatttgaaaaaatgaatgaagagatgaatgacaatatgcacagcattagcagtgtattgtgaatttagtagttttataatggaatgtgctcaaaatatattagcttgttgtctcacctttgacgcaaaaaaaaagcgaattaagttaatttgagatgtaaaaatacatacaaaattcattactaccaaaatatttcttaattctaccctctaaagaacagtcaaaaagttactttaaattttaattttattaaaagaatcttgaaatgaagtgaaaaattaaaaaaatcataatttaaccaagaaatttaaaataggccctatttctgctaacctaatcattcttggagatgctgtctggccacattgtatgtagaatttatgtactttaatatttccaccttattgcatatctattatagaggtagccttgtgagccttctctcttattaatatttcccatagaattcatatactgttattaattttcatatttggaagaatctcagaaaagccaatagactcagaaattcatatatgataaaacaggtgtaaacttccgtactctatgcagaaaaagattctatagatcatgtggcacacatatttttcatttattacacattttaaattagaactaaaatgtaaaatatcagacttataattaaagcctctaactgaagactagacatggccatagacaagggaccttatttaatttgttgagtattctatctttcaaaccacaaaatatgtgctaaaatattcattaaatgtaccaactcacaagagcaacttctctatatcagtcaatattatgtttaaagtaatatgttttcaaatttttcatttctaaattcaattttaatataaataaatgtatttacaagtaacatggcctttaataacagtaaagatgtagatgtaatagtgctacatgctaatttctgtttcagtttctctaggatcaagacctagaaagcacttgagtaaccgaaatataggagaaacaatagctagaaataaagactaattcaaagccaattatatcccaatgtgaacctttctttattgtggtgcttttactaaggtatgctctttagatagaatcattcctgttgtgcttgattagtatttttcactacttaaaattttacagtagaattatttctttaaaaaaatcagagaatttgcttttttagtccttctgaaaacaggcagtttttcaagatgtttctttataacccgggaagatgacatttactaatgtgttgaagagacagggattctcttttgaggcaggcaacactaataagaaagatatggttcaatgtcctaggtattcttccaagttttattaattaggtggaaagcttttcccactggaatagtgcaaggtatttattaacagttcaacccacaaatagaacaaatgtacagcaaaggaggtaattattaaatacaccaacccctttatctacttggcaggaacaacccaaaagacggtttctgattatgatctttttcatgatattttaattgtgcttcttaacctgctaaattaaaaactacagggcaatctcacttagatcacagacaaaagagatcatatcaatttgcaacaaaatgtatgaatgcttctatctgctttaattacaccaagaacttaacaggcaaattcaataggatcacagaaggattgagagctaaatgttatctcttagtcaatggcattatcatttcctgtatgttgttacacattatggagtgtgaacctcagtttaataataagtttgggaaataatgatattgaagtaagggaagctcgctcagctatttgagtcttttggttagtgtgtgtgtgtgtgtgtgtgtgtgtgtgtgtgtgtgtgtgtgtgtatgtgatcagctattcataccctggccaagagcttaagatgagggacatataaagagaagctataatgaccaaagtctttgcttgttaaacaaagccaggatatagggaatagcttacaatttttttaacttctatttttgttctacgtctgtaatcatttttagaccaatactgtgactgaattcctttcagccaaacctttagtttttctcagatagtccatttacctttatcctgaaaatcgtgactcacaccaaaccttcttgtgcatccctgagagtgatcacacagaagattcctgggagctttgactactaagggtttgggattttcattctggccatacttcgggagccgagcccaagacgttccctggtaatgaactggcctaagatgtattctttggtaattcttcatgaaatggatatactacattctgtgggtataaggtgtgtgtctatgacagagagagagagagagagagagagagagagagagagagatagaatgttttctgattctagtactaatccttgttgatcagttcctatccttttcatctggtttataaagggcatctcttttaatgctcacatcctgttgaattccatttttttttcctcttttttgaactattttctatgttcctcccagatgtgggacttcttatttaaccacttcagtaggattcaggcttttttctctcttggaagaataaaaagatgcaattctttttggttccttataaagcaactctttaaaagtagctatagctcttaaatacaaatataaatgaaacatcaacatgtaataatgaaagagagagccacatctcagcagcagtggatgatgcatcacacatatccctggaatttcctattaggtctcaatgtaacagggagaattaacagatagaaagctgccatatgaaggcttatacttcaataatattcagaaaactattattttgtagcatttgttacacatatatctctaatcgtccttcaaaactttttttaaactttcacatttttgtactcatttactacataaaattaaagttcttaatgactccaactgtgttttaaaacattgaattccacacaaaaatacatcaataatgtagaattgaatttttcttctctctacctatttattcatttatgaatgtagctcttggtccacactttgcatggacaatagagtcttgcatgtctcatgcatgaataatcccattttgctggggactggttttaatttagtgtttatttgcactcaaatctttctcaattaagtctactactttctatctcccccttccccccaagcacatggcatttgaaaatgtacagcagtgtttttgaactgagggatttagtggaagaaccaaagaatgctaaaagttccacaaaacacatacgtttccactcaaaatagccatagcaccctattgacaaacactgtgaattaagtgcactgtaaaataaaactggaaattgattacctagttgccacgtgcaacaatgcacatgggacaatcttcaaatcactgacaagaaattgtgtgttctgatattgcctgcagcactgtactatccatccattaaatccatggaatgacactatttgtttggattgtagtattgtttccaaacctgccttcaagattatcattttgtattcatcaggtattttttgaagttttctatcatcattaaaaaagtttagggataaaaatctattttattcttttgtacaaacatccaagaaacttcttccatgcctcttctaatccctgacagctcttgatgagtaaagaaataactgccttgaacctcaaggtttaaagttcatcttggaaacatgggtttatatcacaccaggatcccagcaagcttctaattttgttttatcatcttaatattcatgtttaattgttgcctcttagaggcttaccactaaattttggattacaaatacatggaatttcaacatgtactatcacattttttaatgtgtttctggtgcttcactacgaaagctatgattacatttgctgtgtagtctctcagtctgttcactggaaaaatagtatccaccatcagatgaacagggttgaaacagtattctacactttgcaggattttatttatgtttaacacgataatgacaagtagaagttactaacatgtctttttaagagatagttcagttaaaaacatgaagagattataaaatcttatttttttgcatttatgttcaataatgctgaaaatgcaaaaaaacttagagatttgtttcaaatattgaatagaaacttttgataacttgaattcatatgtgttgtaaaatgtgaatagcaattacttgagtgatactattcaggaggcaaatgttcatacagagataactgtgtgcacttggaaataaactttgggtcttggtttcctcatccagacaaaataggtggatgatgacaacaatttcacagggatgttgtaggtatcaaatgcaagtgaatattaaatttatttagaatgattttataatctcaacatcattgtgcatatgataatcattgtcattattattttttcatcaagagtaataataattcagaactgcaaagtgcagagacatttcacataggtgaatttcattatataaaactccaaaacatgttttaaagattttagtcaccctgattaaattccttaaaaataattacatatttctcattcttcctaaacaaagtctattacatactatttaattttcctgctgactcagaatctgcacaatatcaggtaccaatcaggagatccagggttgtaaggagatgccctccaaggttactgaggaatacgggggatacccaaacccacattacacagctttcagtgctaggctttttggtgcttaatctgcgtttcatattttttcatgcaggctcccttacttttaattgctgtccgtggaattccctttagcatcaacctcctctcaaaactgctgtggagtggaagaagagttaatctagttagaatggtacctagaacgagtttcaagagctgggggactctattacaaatataataccttctcaggtcacctagaaaaaacactgtttgttttgttttgttttgttttgtttttgtaacattgctgtaaggaattggagttattcaaaatttggtaaaatatgtcctagatggagagaaactgaattgaaagacagtgacatgaaactgactttaataaaaatttctgcataaaactatggttttatgggtgtttttctcttaaatgattaggaaaacaatttaagaattagaaaatgacaataagaattgaattatgtatcctcatatattttcaagtaattgcctggtatttatgcaatataacaatatattacatataatgattttttaaaatgtacccatttattttattcatttggagacgggctcgctctgtcacccagtctggagtacagtggcacaatcatagcttactcatcctccagggttcaagcaaaaaatcctcctgcttcagtttcaccagtaggtaggactacaggcatacaccagcatgcctagctaattttttaatttttatgtttttttttttttttaaagacaggatctcactatgttgtccaggctggtcttaaactcctggctttaagggatccttctgcctctgtctcccaaactgctaggattacaggccttagccactgtacctggcctgtattaatgatttcatataaactttaaacaattcattgtcaagcttgtaacatacccaccccaatgcatacgttctaaaaatgtccagattaacattaacattcagaattagtctgatgttatttgtataaattcatataaaagacttacctattaaaaattcaaatgtcttcaaatatacatagctttgatctaagtatttagaacatttatcacttgtttataaatttttcaaaattttattgatattcaaataataagaaattgtttgatgaatacacacatacttatatgtttgttaaaatgcatgctgtttactcgatgtgctacaatggcctctttctccccattatatgtgaatatgtaattaacaatgcaataaatatctcccatgaaatttccaagaaaactcttaattcaaatgttccctggccactttttagagttcactattttttctgttttatttttaaataccaaagataaaatgtactgctcggtcacagagtgctcatgaaaatataccctgtctgctctgcccaaaaaatatttattgatcttattgatgaagatgacttcttgtcaagtgagagactagagatgataataaaactatcctacttatgtattaatttataagatttgcaaaattgaataagaaactaaaaaactcactcataggatggtttaagacagatttctcaacatcagcactattgacataattctttgatgagagcaggaggtggggggattgtcctgtgcgaggtaggctatttagcggcagctctggcctctacccactggatctccctcccctgactgtaacaatcaaaatattgtcagacattaccaaatgttccctgtgaggcaaaattgccccatgtgtcaactactggcttgtgatgatgtaaaacattttccttcctaaatgaattattcgttgttgagaataacggtatcaaaaaagcttgtctgggtctgtgcagcatttttggaaacctaatctacacaaacttgaacaaaagggcctcctctatttcctaaacttgttcccaagcaaaatctccaactctcatagcaatactaggccggcttcatgggcgtgcaaactgcaggaagccatgctcggtttaatgctctgttgtcaccaccttgaaattcataataaatttttaacaagaggatcggcattttcattttgcagtggactttgccagttatgtagccagtcctgcaataatgatcaaatcgacattatcagatgtatcaatgaaatctacattttgtcagcctaagttttggagatactatgtgctttaaaaaaaaaaatcaggttgaaagttaaaaaggactagtctacattagtaatttggtttagcatagtggataatgatcagggtttggaatcatagacctaaatttaaatttcacctctgctatctctttatatatatatatatatatgttctgggatacatgtgcagaacgtgcagatttgttatataggtatacatgtgccatggtggtttgctgcacccgtcaaaccatcagctacattaggtatttctcctaatgctacccctcccctagccccccatcccctgacaggccccggtgtgtatgttccactccctatgtccatgtgttctcattgttcaactcccacttatgagtgggtgagaacatgctcatctctgctatcttactagctttgagatctcaggcaagttgtttgacttcgttaaacttcaattttcacagttataggagaggccatcttcaaatctaggtttaagattaattgagataatatatgtaaaataatcagtatcaggcctggcacctagcaagagctcagtgaatgtagctggatgatgttgatgttgttgatgatgatgatgatgatgatgataccaaaatccattctggattgggatgagaaagagtaaaattcaacctcaaaaccttcctcatgcagtttttgaaggcagatttccagagttcaatgttagtccatttgtttgaattactgccaaattttttccatcactgctaacaaaaaagtctcaattctaaattttaaaaatgctatcaagtatttaaaacttagccctacatttacactcccaggtacaattaattgtccagaggcacacatttaatggggctgcacatacacgtctgctgacatcaccctgtcaatggtgcaagcgtgtgtgttaatacatttcatacattaaagatgtaaattttattcttcaagctgaaagccaggtgattaattctcatagcatagtgatcaattggtgcagatgctccacctgtattaatgtttgtttttgtacacattagtagcaggagtacaccaataacgcaggtgtctgacacacagctatgcaacattccctttagccggcaaacattgagatcagtagttaggttgcacgtagcactgccaattttttcaattagacccattattgatttgatgaaaaagcaaattaaacataccatggtggtatgtaaattggttagagagagcataaagttctggtacaaagcttcaaaggcatgagctatatggctttcatcagcagtaactcattaggggttcctggcaattgctgctatatatggggttccttgagctacgtgggttggctagcaaaacaatcacctagaaagacctggacagtatttttaaaaattcacatcggttttgcagaaagaaaaacaatgccggaaatcaaactttgagtggatatggacaaaagaaaaggtacggaagtggcataaaattgcttttgtaaactttggctcattttcataaggtttggctcattttgcctgcccacctgtatggcatgcaaggtgaatcaaacgggtacacatgtgacattttataagttgattatgttgattcaaaaatttgtcttgacctctctctcaagtgactgcatgttctcattgtctaaatttgaagcctcttggcttggtctataactagagtctaacacaacttttatagtataattccttaaaatttaaaagaatgctctttcttcgatgaatgatgtccttcagttctgctaacagatgaggcagaggtcttgaaaatggacttgtttaacctatactataggtttaaccaaaagaacaaagctagtaattaaaccttcacatacatttgacaccttgacaccttcccatacatttatctttactggattactctacattgtgcaaatccagctgcgatgtcattttcttcaagaaatctaccctgattccaaatgttagagtttccaccatggtacacctatagtacgctgggctactccatcagtgcacatagagcactgttataaatgcctccttgctcgtccgtattccccaatagactctaagctttaggaaagtgtgcccccatctaccctacttacttttgtatattgccttgcagagtaattaccgtaaaggtacccaacacatttaaaataattaagtaaataatgcagtaaaaattttaattttgtcaatttcaaatgagagtgtttattaagtaagattccaaagaatttgcttttctccatgcaaataagggacctagcaggccaaatgattggtactgccaaatgttaagctctaaattttaactgtatagaacatgacaaatctgtcaagacaaactagaatctctcaatgactatttcaagtgccaccgaaataagtagcaggtgcaccaaggtcatataaatatgttcttcacatgctatttagcaacttacactggagaaggcaaataacttttacagagaagaaagaaaatgaacaaaagtgatgtcagtaactaggtaaggctaagaccaaaaagaaaatcagagagttgcaaattttaaataccgtaagatcagtgatggaaaagaactttttatatcagaactcaaaagaaagagaaatagataagagaaaaatattggaaaggagggaaaagtatgaatattgattgcattgagataatcaaatagaaccaagagagattggggagggtcctccatttgtgataggacaatttctgcaaataaataaagaaataaagggacaagtgtcacaggtcatcagcagatattgagttgccaggagagcataattagagaaaagacattcagatcagatagtccatccatacaattatatttattatcctttgaattataacatcttatatctaccaagatttcagtatgtgccccaaattaacacactctttctctttcttggccatactggggcactgcatacatgcacgtcttcacagagaatggcttagatcaaaagaatacattgcccacacagagaagctctaaaatgtgaaacttagaaaaataaagtttttgttcacattttccccctgaaggaaaaccattccatccaaatacatgaggatggcataaatcacctgaagagttcttgattgtttttgtttttctttatttttacacttgtaagttcattttttttaagagaggaaatatagaagattggagctggcactgccagcagtttctgatgggagagagcatatgttttctgtcatgttggcatctgactgcaacagccgtgcggaagtcagttcaagtccttacatcaaagtttgcttgccattgtggggacgttgttagaagttgaaaaaaagcaatgtccatttgaagcttgtctgtgaactttgcatgaaccgctaggaataatgtagtgtgatgacaagccagttataccttccactaaatttgctgtctggaatgaactgaaatagtgtttggtttgtgtaattacgtccatctatctttatattccagcggcatatcgcaaattgaaaatactaaaaattgactgttggttctgatatttaatgattgccaaagacaagacgatgatttattggttacttaccgatgtgacacatttgcatcttattagacggagattactattccttaaaatgcggacgaggcctgatcatgtctgatggattgatttgatttgcaaatgtaatcaaactaataagagggaaaaaatgagcaataatgccttgtttttcaactggcaatcactccgctgccaacaaggctgatatccctgactaagcagcctttacacagtcttcctgtcacctcaaataaacaaagggatgctaagagcttgataagaggataacaagccaagtatggacgcaacatggagcccacacctctgaactgtgctgttgccggagagaacaaaagtcaacggcaggagatgtaacacaaccttaacaatcttgagaaaaacaatggttgtaatcagttctatattcccatattaagtcatggtcaatgaagaatcttttcttaaagtaaagatactgccattctccttaatgcagaaaataggtctctgttcataaagagactccatttctgaagtagtttaactatttaaaatccaaatggtttcagaacaaccatgcatatagagtttaagaacagcataaaagtcctttcaggcagattctggctctcagtttagtccacagactatggctgataatcagaacatgggaatagagagccgcagaacggtcaatgctgaaatactaggccaggaggcgtggttgacatctgacttacatcactctcaaaacacttcttcaagactcttgactatgtgagacagaagaattaaaattatgatcacgaataggctgcagaacaacagtcttgaaataaaatttcaaaaaatattttgataatgcataaaccatgcatcatagtcataaaatactcacagagacagtctcccaagaatagcagtgttagtaaagcttatcatatagtaggctcttaatatatactttgtttagtgcataaatgaataggcatgagcttgctacaaaaatatattgcacatggtatttttgttgaggaactgaatattacaaagtgtttaggaaaatgtcaaactgaatttataaagcttatttccatattcagatgtctcaaaaaatatcctagttgatgttttgtgataacctcactacccattctcaggccatataaaatgtactcaaccatacaatatagtacggttagatttaaattaaataataaatagttctattctaactataaaaaattgccttggaaatttgagttaaagtttcatggcaaatacacagacgtgttaaaaccctcagagtgcagagggtcagacaaccgatcgggttaattaaaacccgtggattattcacaagctaattttaaccaaatgttatgtactgatctgccagaaacagtgtttgttcaaagatagcatcaatgcttacatggtatgttcaaagatgcttctattttgtgcagagagatatagtagagaggctgacggagatttattattgggtgtgcctttaaagcatctttaaattcatgttattttatccttctgttgtctttactatttagctctgcatcaagatccttggcagttgttccatcaaccaaactctcggccacttgggctgttggccatgttccccaatcacaaacctcagtcagtctctctactatatctctctgcacaaaatagaaagattctgaaccatatctataaattaatagtccttcagaaacagatttaatctgatatattcacagagtatacccaggctataacaaataacataggcctattgtttatactttgtgatatctagtttttcaaatatccaaaataactttcctaaaacatattcactgctattaatctatcttcaagaaatatattgtccatataaatcatgtatatctatatatataaaatgtgatataatataggaaaaagttaagatgataatttttaaatatctaatactatgcataagcaggaatagtatactcttttctgaaaaactgttagtgataatgataaatatcaataatgcacaactgagcattaatagacctgagttttagtctcaactctgtctctgactagcttgtgacctcatgcagatcattcaactttcttgatcttaagcatctttatccataagtgaatgtgcaagtaaaggcatttaacgtttgttgaacacttgaaattatatgtcaaagattagactgggcacttggcctgcgttagctcattggattatctcagcaatccatacagtaggtattgctaaccccaacttatatatgggcatactgagttcatgggatgtggcaataccaagatttgaatgagggtctctaactacaaagacagtacgttgctgactacaatatggtgcctccccttaaaatacaaaggtctagcaaattatctccaaaggccattccagctctatcatcccagaatcgactttttggggaaagggatctagctttgatattattccatatattagaaaggggtgttacaaagcttcctctagacatgcttttaaataaacaatcatattttgaaagtttgggaacatttattataaagctctctcttttagaataacagcaattcacagaaacaaagctgaaaaatctgaagtaattattccatgtttttccgcaaaagatgaatttaagaaacattgtgttgaacctctgagagtgcattcctcttttaggtatgcaaatctgtgctgaggacaccctgccactgggttttgccatgacacagacaaatcacaagaataagagcagcttgacttattttttttttttcctaaaatgctgaccatgtcaggaagagttagtttctccaggaactcacagctgctccttctccctctctccctctgcagcccaggccaccatgtgccctggcacaaacgtgctgactggtggaggaggcccagcacttcaggtaattaatcctttcctaatgtaggttaagcaggtgtgaagcctccctcatacagagaggaggtggctgctctttggagacacccctagtgttatggtatttaattgggctcagatgattctctgaaactgggtaggtgtgttgctgacctggacattcagttttcaacttgcttaagtgaaatccagttgaagaaattggtcttttccccttctggactttctaatattaacaatttgtggttgccagaataatgcccattctggcaatgaaaatataatttcctcattggaagcaaagttatgtgattactggagactagcagagtttcagattaagttgaattgactattgctctcagaattatcatggatggggtttattcattatatttctctcctttccaaaatacaatgcactagtacatttaaattcatatgaaaataatattttactgcaccataagagatccaagtgtacataaaaagctaaaacaaaatccctactttgagtttacataccttgtatatcattcctgacactcgctataggaaaaaaaaataacctggcaaaaattaatataaaaattgtggactactccagaaatcaaaaattttaaaagtgtgtttttttctaagagaaaaaaagttttcttcttaagagtcatagcaaagtatgtataaacaatgggggcgttatgaccatttagcatacaacacagcctgcttagactgttgccaatgagtgattttggcaggttaaattggttcttctacttgaaatcttctaattgaggttatttatgatggctgaattggggaggaagcagcaggattttagtgaaataatatttctgtaagagtctagtgctgtggacacacttggtacggtgttaagatacatcatttgaggctgagcgcagtagctcagcctgtaatcccagcactttggaaggctggggtgggtggatcatctgaagtcaggagtttgagaccagcctggccaacatggtgaaactcctcctctactaaacatacaaaaattagccggacttggtggcatgcacctgtaatcccagctactctgcaggctgaggcaggagaatcctttgaacccaggaggtggaggttgcaatgagccaagatcatgccactgcactccagcctgggcgacaagagtgactctgtctcaaaaaaaaaaaaacaaaccaaagaaaaactcatttgagctgagtgcagtggcttatgcttgtaatctcagctacttaggaggctgaggatggaggactgctagagcccagtagttccaggttgcactgagctatgatcatgccactgcattccagcctgagtgacagagcaaaaccccatctcttaaaaaaactaatttgtaaaatgccattaatatggatagttggggtcacttttgctgtcagttagtacaactttcctgttagatttgttgaaaattaaagaaaagagaataataaaaatgtgtagttaaagggagaatagtgcttcgactacatctatgtggacccttactgtgattaataaggaaaattcatcatcaacaagaaagagggaaatgaacagcaaaggaatttgctgtagcgtttgccttcctcttctcctttcactgccctgataatccctcaacagaggtgatgcaacagtctattagatctcaatatcaaaaatattccctgatattcctcacacctttaattcctccccaagtgtccatattgagttcagttcaactccctttctcttttcttcatccacaccagcaccattgcctttcacacatcaaaaccacactttgtttcttgaacctggtggttacttattcactgaaccttggtctaacaaggaggtaggctgactcagtcacataaaagaacacagccaaggctgacattcttgggggaaaaaaagcatacagatgagcaaaggtacatggcttttctctactgaggtttgtgatccaaaattatttcaaattctccttctagtggaaaaagccctatcctttaaaacacatacacactttactataaatcactagcactttcaaggtaacaattctattttgtgtttaaaatgacttgaatatttcttttccaaaataattaggttattttccagttttcacgaactaattttgataggtacaaagctggattacccagctattatatgcacaaaatatagtgtgtgttatcatatcagaaattctaagttcagctgagtaatacaggtgccctctttaaaaaaaaaaaaaaacctgaatagttaaaacaattttaagaaatcacttctctgcctgtttaaaaagtgcttttaaatgactgtattctatagaaaactgtttctcggatgcctgatgtctccagctgccacacaatttatatctctttcctctgctctttgtttttcagccattttccctgaatgtcaaagtcaatttagtgcatttcactttgctgaataaatcagaggcgaaatccttgctaaaagtgaaaatttgatttgctaaaaggagcttagggcaactattaatcaatatatccagagtgtcaaagccaaggccaggatagacacgcattcatttggagattggctgaggcagataaagggggacgcaggggaaaaagtgcgaccagcccactgaagggaagtgggattagggttggagagagggtcaaaaaggagcaaaggggaaaacaaaacattctatgcatcatgttctgcactcctcccccaacttttcttttagaggtggaaaaagcttttttaatcaagcatttaagcatatatgaattatactaattatgccagcttttatataacaattttctcacaaaaccacgaggctttctctctttaacttatcaagtagcttaagaataactaaaaagtcagaggtaacagctccattaacaaaaaagaagagtgccagaaaaaaaaaatatatgacctgggccaggtctataggatattgatgttttgataatcctcaggtaagtttcaggaaatttcaggcttctaaaagattataatatgtggtgaactgaatgactgagctcatcctgtcactttatcgttcaaaagagcttagcaattaccatgaacttgccttaaaatgataacatattttaggacatagtacatgtagaaatcctcagcactcaggaattgttttcaaaagtattgggaaatctttctgtgtgtaaaataattcaaaagttccaattttaatcttttcaaaatgcagttcaactcaggtcatcttcagctaaaactttcaatagcacttcactgccttcagaataaaatttgttttccttagcataaaattcaaggtttttcatgatggggtccttgcagatctttccagcctcaagtcacatcttcttcccatgctcccccttctaagtctccatgtgactctgtaggagaggactatcatagccctcataattcagttatagttgtcaaatcacctccctgaatcacccaccacacagtgaagatgttaaaagcagaatttgtgctgtattcatgtgtgtatcattagcgcacagggtctgacatagagctcattaaatgcttatgcatggaaggaaggaaaggaaggcaagaaggagagaggaggaaactaagaagaaactgttaagtggtagagctaacattttttatatggtcaagtcttgcacaactactcacttctgctccaatttacctataactttcaatcagattaattgcccagtgatctgaagagagtcagagacagggagcatccagtcttagcaaccaatcatttaaggacttcgccagctcttcacatgagcagctagtgattgacttgtttcagtaaaacttgtaatcaggaatgtttaaaatacactcttgtccaaacatcttgatttttattgatttataggacatacatttcctttttaaattcactctccttccctttaatctttcattttttaatgtatagataagatttattgatagggcaaatatgttacatttgccttaacttgttataaaacagaagtaggtaatctggaacaaatgacaatgaacaacagaaaagcagacaaggaatgaaaagaaagatataaggaagccactgttaaaaaaccaaaccaaaccaaaccaaaacaaaaaaacacattaagttaaatatactatgtgtctaagtatcattgtcaacggtgtgtgtcaaggttcctgaatctcaggtttactcatctataaagtgggactaataagattgaaacttacctacagaattgttgtggacatcacataaaagtttataagggtcttttgtaaacaataaataactatggagatgttagttagttttatatttaaagcttaatcccatgaaaaaaaataaagctgaataaattctggaactaataaagttgtaaaccaaatagattatcacaaatgtatgcacacacatgtatatgtatttatgcagacatagatccatcattcagggtagatgtcatgtcatgcacatcttttaaatttcccatagtacaaagtgtagtgttaaatatacaggagacactcaaatacttaaattgcattcagtgattactatgaaatgattatttcactttgatcacaggtatataagagctgggttatgtatggatggcaaatatattttggggagtcctgggaacaagcaaaagcaatgctggaacggagacacatgagcacaggatatttagtatgatgacagaattgtatattaggtcaaaaacaatggcatgagtggtgaggacaggcctctctgagcatttttcacaactttggcttgtctcttgaactagatctctgcctaggaaacctagctacttctctgttggtctacttttttgtttccagcaagggtagctgcagaaaatagagtccctaagtaatatttcagattatttttttcaaaacttatttctcaacttactggttcctatttcgatgccatagttgtgacttcagaaactattaaactggtaaattttcagttgttttaggcttaaccaaagaggctggactaaatcgtttagacgccaatggtcctgcccatgtagaataaaattatgacagtatctacacaatgattctcttggttaaataagcttttctcccctctctattaaaattgatgtttgttctgaatttttataaattgcttttatgaatatgaactttttagatcacttggttttaattgtaatgacaatctatggcagtaccttgaaaataaaaatgaacactgaatgctgtacatttagatcatgctttataatttgaaaattatttatacatataaataatttgcatgtattttttttcctcatttgatttctattttaactgatagtgagagtaattaagtaacttacaaaacattactcaatgacagctcaagttttctgattttactttcagaatcattcgacccttattaatcacaactacaggtatacaggtatataactaccaggtacattaaaaataacctttaaatatttcataattgtattctgttttttgttttttgttttttgtttttttgttttttttgcgatggagtcttcctcttgttacccaggctggagtgcagtgacgtgatccgggctcactgcaacctccgcctcctgggttcaagtgattctcctgcctcagcctcctgagtaactgggattacaggcacacaccaccacatccagataatttttatacttttagtagagacggggttttgccatgttggccagcctgatcttgaactcttgacctcaggtgatccacctgcctcggcctcccaaagtgttgcaattactggcgtgatccaccgcacccattccataattgaatattctcataatttaaacagtcttattaagtgccaaggttttgggtcttatatttaactttcttccacttaactaaaagacttaactacttcacagttctaaaatcattaggttacatacacaaaagaaaagttaatcctgaaaaaagaggctacaagtgttttaattcattcatagcaaagtagaaatattataagtccacgtaaattgagttatgggatgcagcagagggtggaaacttggagccagttaagagttttgtgctatgcacatttttagtcaacaaatcaataaacatttttcaagtgccaatgatacagacccaaaacagaatataaggtatgactaacatatggtataactcacccttagtcaaccatgtcctgtgtcctgtacatcaaaccttaatcacacacatatatacatagaaacatagtttacattataaacggaaacataacattaaattatttttgccacattttattgtgcttttgcacgtatcctaatcacttaatggtgctactattttaagatgggtattttatccaccagtacccagtaatgagtattttaaaaatgaaacctccataattttgcttggtggatgatataatcttaaaaatttgactctgtaaaatttattagaacaataaatatatcttcaagcagtatctttagcaataaatatttacacatgcttggctattcttttccaaagtttataccctaaatgtagaaacagtttatccatgttctttatagattcctttcattgctagaaaagtctaaatacttctgagaaaactataaaaagctaagtcaatgagcaatttttgatatgttctcctaactgaatgtttttatttaaaaaatgtttcagggcaaatagtaaatattggtttatgtggcttagatttctgtttcttatgtgaatacatatacttaaagactatttattacatcatcttccttatgtagttttcttttagagtttaataactcctgcctccagttgataggaagaaaaattataggaatttttttctatttgatatcattacaatagagatcaattgaaaaatgtaactgaggccccccaaacttgagcaaagtcctccttcttcaatgggtaattatttaatttgtcacgttaaaaataaacaagcagacctgaagatttgccatattaataaacaaagacaattttttctaaaatgcattcattcatttaattgttaaaataccattctgttattttaaaccaagttgtctggcaagatccataaatatgtttaagccatttatataggtcagctaacatgggttatgctttttaaagcaccatctgactaagcacattctgcattttgctaacaaagttacagtacataataatattttaatcaaccaaaaagaacaataatagatctgactgttgggctgataatcgtcttatcacaccctgtgaaacctagctctaatatttgacagagcctccattacttggcaacccattcgaaaaaaggccaacaatggagagggagtgaagtggagtgtgcagtacctccgtatctacataaaagagattagaggcgacagcgttccattttacagctcaatcatattgtgttagcatgcgcttatccgagcgcggacgaaattgaaagagaaataaaaaagagtcaggcagataggaaccagaaaagcgaggcatgagcaatttccaaggatataaaaggatgctaatggctgggccctgtcattcttaaaaagggctattagggcaccatcatctgttcttgtgcccttatgctcctccaactaaagtcaagcattttctaaagcccttgtgatctttttttcttctagagataaagtatggtcatgtttcataacaacacactttcccatttatatgatttattaatgtaagtcaactaattctatttactgataaaaaaaacctattccatatgtattttcttcaatagcttcttttgttgtatccttcactttcttataaagaaagtgtgcaaaagtacattcgaagcagcacagaaaaactactcattttcgatgctaaacttaattttaaaaacatatatgtacgtgtatgggtgtaattatacaaaccgagaacagcataaagataacaggggcttgaattttagtgtattaaaaaatgacttcactttaacataagctttacaaaaacaaagagttttaaagttaagaccaagacaggtgaaatttcagttctgatttggctttaattccggctatgaccccagttatcaggattggttcatgttatcaagaacacaatttcacttttatcgaggcagaaatgtgacttttatctttactttctccagcctttacttccctgtctctcagtccatatagctgtagtgtggtcctctactgaccaacctcctgaacccagggtaaggcagcacactttgatatcagaacaccctctccttctacctcaagcgctgtatggcataggtattattaaattttttttttaaatttctgttaactcttgttttgctaatccctttctgaaaagccaagatattccttgcaatcatttacaacaccctcaggtatcacgaaaatcagagctgtgaatcactactccacagtgaactcttctgacatttgctatagagagagaataacgtcagtccccaccaattctaagcctcagcttaagactgaacccataatcgtatagtaattgtttccaccactggaaatggtgttactcatagttatttaaagttgctatctttacaaaagtcactagagcccctttactgtgacaagtccctttgtaagctgacatttctacttggatgcacagtcggacctacatatttatcactcactttccttactagaaagttcaaaagaaattgttgacttttattggtttttattatgctttatctgtatgatatcaaaatattggccttacaaatcttttatttcagggacaacttgagcagaactctccgaaataatgggtggtttggaaccatagtgacacagcttttcacgctgttgttaataacaatattatcatcattatcattttgaaataggttttttaaatgcaataaactggagactaaaatatcttgattctactccaggaagccactctgaaggtactggatatggctgtgaatttgtgcaagtgttttttacctctctctacctcaaatctccttatctttgaattgagaataataatacctgattcctgggttagaacagtggttttcagtttgggggaagagggtcaggctggggcgattttatctcctggaggacatttgaggctgtttgaagacagttttgtttctcacaattcaggggtgctactggcatctagtgggtagaggccatgggtgccgctaaacctcctacaatgaacaagggcagcccctcatgacaattatctcgtcccaaatatcaataatgccaaggctgagaaatcctgggtgaaaatgatgatatttaaaatgtgtgtatacatatatcataatgatatattaatataaatgatatatatcaatcacctaaaaaagtgtctatggacacttcaacaaatgtgagtcttgtttctttcatctctaaacccttcaatagtgctttccttacaaataagttttcatacactgttgaagtaaattctggctgttcccactgcattaatcaacaattgtcttacatcttgcagtaaatcctttctttttatttttctaaaagtcatacagatgtgattacaatccaactgcaatatcaaatatccacacaatcaaattcttattcttcttttatatgtagtaatccttgtgtaggtgtcttctaaagaatatacaagctcacctatttaactagttttgacttaatttggggggctttattagcaaacagtgtaagacaaagtagctggtataatacagagtgatgtttaaattagtttacaatttgcttggcctcatctagaactacaacgaacaaagccattcagaaatgtcagctgtgttcctaaccactgtaacaaattgtcgcctgaacgctgcacacctaatgacttcaaattagcttcactgcgatatcgcctgacagttcgttacgactgttagcaacatagctggcgtatcatgaccaataaattggtttcagtgtgggctgggaaagggacttccatcaatttgattaaagaaattactgtagcattcaaagcataaagacaaactagtttaaggagacagaaataagttaactgtaccagaaaaacattgctcatcattcaaaaacttgtttataaactatctgaaaattcaactccaaacaaataaaaaataattcaagtagaatactaaaattctcaaaacttacaagcatgtacatatttgttcatattacaggatgggtcaagaaaaaaagaagagaaatatttttaaatgctaactttaaattaccatataggaaaagttaccatgtccatttaatatttattttcacaatttatctgtaaagataaatatctgattgtaagccaaagcaaagcttgtgaatatgaccagcaataggatataactagccactatgaacaaaactagtgattcttagttgggaaaatagtacattaggctaccgctgacaaaaacattttttaaagtgaaaagaaaaagtagaagtatttgctaggaaaaaggtaagaattttgacaaaggataaagaaatgttttaaatttatattctcgttagcttacactggcagtagtacctgtacatatgaaaaactaacaagaactcaaggtggtaccaatataaataatataaagtctaaggattctattaggatatgcaaaactctaaattatgattaaaaataaatgtaaagggtttttttaagtctaaatgagaaaaatttgaattcacccaaatctatatacataacctagggaattaattgcaaccttttcttttctttttcttttcagaaaatgtacctggaatatgcttcgcccatccaatgataaccaccaactctcggtcggccaagtcacacagtgtagtgagggctttgatgtcactgtcggggacagtagggtcaggcatggcatagatcttctccggttcagccaccaacaaatgtgagacaatcttgttatctgcaggatcagaccagagcactacaagatcactagtagtatcatccctcttttataaaccctagagcattttgtgttttgaaaaacaatccaaatatcctacaataaacgctaaatattccaattatggctcaataggtatatattaaacggtgtgcaggaaaactcatagcaagacatatgccactgcagtcgtgatagaatgtagtctttttttttcttctttgctctacctgcttttgctggaatgaagcgtctgtcctgtagtgaaaatttttatagcaaacagataagagaagttagatgctttctgggtttgtgctttgattcttaagtgggatttggtgaagtagattaaatggtataaaatagcttaaaataaaacccccagtaaactattgaaatatagatcataacacaggaggcaaagaactactaatgcctatagtcataatgggcatgaaagtcattaattgtcttaattcctttaaagaagagcaaaggtcagagcccttctgccttggtgaattactgactatataactctatctccgtgggatgcattaaataggaatttatttttttctccccctccccacacacccagccagtcttccaaatacagctaatatgtttccataaaaatactcctccttaaatgttacagtcattttctcttctgtgtgtcaaattctttaatcctctattttcatcagttgtccttagttcattctctggttcagatttatctgtctgaaatttgtgatatatgttttaaaaatccttcaaaaaataaacactagagacaaatggaaagcatcacatcaaatgtgttttattgctcaggggcatgtgagggtttatggaaggggctgtaaagtcttggtaacagaatgatttttcttgttggccctattttcaatttctatatgtagcttaagattttatgctttcttctaagtgaggagatacaaacgggtgagaataaacccacatatttaaatgttctatgtactattactgtagaaaaccaggactttaaatgaggttcttgtgaacacagccaaagttcccaatgtgtttatcagactctttgcctctcgctctaagtttttaacttttttaacccaatataaaaacacttcacataacttagagttaaatatagcattcattttatctccttttatgaaagaatgtggcttgtccaagctataattagcactttttctaacataacatttaaacatttatgaatatggctcccatattaattataattatttcaaatacacaacagataatattctatcatcatcaaattgagtaggcagatttgggaggaaatattcccaaatactacgttgactagaaaagaattaaaaattaaatagagattaattttttaatatttaatttggatttttcttgtatgctacagaaacaacaccccatacttttagttatgcttggaaaagtttcaactttcattgctctgacaatgcaacaaaacctgtcagcaaccattagattctcaggattagaagaaaatccaatagtaaagagcataaaaatatatccgaaagtaatcatgattctagttgttttttttttagtacagggaacatagcactggctttatccaagtcaatggatacttgacacgagaggtcagagaaatttggttgaagcttagaaattcccatcattcagaaaatggaatagccggcagcactgtttctaggtaaatcttatttaatgtttccctaattagaatcaatagaacccaattttcattcttggttctttgtagtacacaatcagtcagggtccagaaacctccccagccactttctcagcaaagctcaggcacagtctcttgacacttatctgacaggatctgaaaattaagttttataaatgtttgttacaaaaacacactaattggatggactaaagaaaattaacacagaggcctttagataatgagtaatgatttattaggagtcctctttatctgagacaaatggagctcactgaaattgctgtaatcttcttaaaggtacttgacaagccacttcccaatttctcaggtttacgaagaaaaccatagatgctcctctatcatttcaacttacacatgggctggtgctcatttttctttcagtagaggaaattatcaatggtttcagtcaatgtttgcataaaataaatgagaaatgggcagtctgtatattagtgaattcagaaaaactaaacctctaatgaaattaagcattagtgtttattgcatattattgtattatcagagaggttttttattataatgtgcaaaatctgtttaatgcagtcctcgattgtatttgcagaatgccaaacagcttatgcaggctgaggagaagatgccagattggacaattgaaggtataatcaacataatgttttttggaaaggcaaaaggaaactatgccatatgttcacttaagctttaattttatgtaaaactggttgtttttcctttgacatagctaaaatgtcctttcatttacagttcagggtctgttttatttatttaacagatttccatatgctcacatatgtatgatgcacagcagtgacccctcctggagaatctgaattagaagtggacatcttctcttcccctgaaggcagatcaaaaattacccatgtctttcctagaactgctacagatgcattttcctctgatgagtgctggttgtgtcttcttagaaaaagacagctaaattggaaaaccgttttcaccaaagcgctcctccatgcccagtaggatccctattcataaacatcctaaaacgctagttctgttgcactacaactattaactgattttcagaaaataggatacagtgattgcctcaatctatattccaactctttttcgttaatgacaaaaagaatggggcttgcattttagcaatgtaccagtcatcctttcaaattgcaacttggctccataaaaccatgagctctttaaaaacaattcataccgtccataagggcatctcagatggaaccagccacctatgcttgttattagtagtgcccattcttgttttaatctattgctagctagtgtgttaaacttctatagctccaaattaatgaggcccctaatgtattttcattgggaggttgagcagtcaaattcatttagttagtgaaaactacaaaaatcactttcttgtgaaatctgaaactaagagctccaatgaactaatgatcacagtatgatccattttatgtacctctgcaaataaagataaccagtaaatgtaaaattcacactatataagctatgtattaatatgcttatgcttccacaaaatgactaggttaaaaaaaggctggagagagaaaaccacagatatctctaaaagaaaaaatgagataataagctgagttgctgtcgctcctcacagacaatctttgggaatagagccactgttctccaacaaagagaagtctccttggagtcagtagggatgggcatgccaaagctgatgtacatagagccaactgggaggatttcgtgttctgggaagccagacacatctgctgtacttacatggctttttggctggctgaaccagctgagggttcaggtatgggctgttctccgcatctatcctgcgcttgtacttctgccgacctccacgtactctgtcaagacgcacccctgtgagcaaagacaggcaccggcttactattaaggtagctatgtttgagaccaatcaaatacctagatggtatcccccaagagcacataggtgacaaacagtagaatgcagaatggaccaggggtactcaaataatgtaaataagtggtggctaaatcaaacttgccagaggttgaaaaccaaatctgtcagcagatgacagatccgaaagacatttcatgcaaagccatcagggtcactatttgcacatcaaagaaaaggcagatttccatgtagattaatacaaagaagccgctatttggtgctagtatagtttcttaaattaaagaccctggcatttagcatccttttcatcagtcagccctgaaagctcaatgtgtaggactgagtagaccaagagctatccaacttccctccagtctgccagaggcctcaggatggacctgtggaattgagctgaataaagagcacctatgtgctggggaggagggaggccagaattacactacacagattcagtcctgagagacgcaagaattgttctctatcaaaatgtcaatgtctcaaggggaatgttatttacattttggcacaaatttgtatttcctctcatatgtgagaaaactgagagcaggtttgggctgaacacaggatagaaaggggagcttcctagccgggcgcagtggctcacgcctgtataataccagcactttgggaggccaaggcgggcagatcacctgaggttgggagtttgagaccagaccaaccaacatgaagaaaccctgtctctactaaaaatacaaaattagccaggcgtggtggtgcatgcctgtaatcccagctactcgggagtctgaggcaggagaatcgcttgaacccgggaggcggaggttgcagtgaactgagactatgccattgcactccagcctgggcaacaagagtgaaactctgtgaaagaaagaaagagagaaagacagagagaaaggaaggaaggaaggaaggaaggaaggaagaaggaaggaaggaaggaaggaaagaaggaaagaagagtggaagaggagggaagggaagggaagggaagggaagggaagggaaaggaaaggaaaggaaaggaaaggaaaggaaaggaaaggaaaggaaaggaaaggaaaggaaaggagggaggaaggaaagaaggaaggaaggaaagaaggaaggaaaagaagagcttcccaaagaattccaaatgcttggatgtcgaaggaagtgaatgttaaagagggctaaagggtgaagctggaaagtgggcaaaagtagactgacaggaatagaactttttcccaaatagtgatgggttgggtcaagattcaaaggggattttctggcagcggatttaaaagattaaggaaaaagccaagggaatgaatgggattacaaatataggaaaatttcattaatatcaggaagtgatagggaagagcttgtcaatctagtttccagactataattgtaaagtttagcacaggaccatataagtccctaccaaatataaggacgactgcttgggagcagaagtgaggagacactcttttgcaatattacattgtactttaattgatataacaatgtaaaagtattcattaagaagttcaaccatgtaattcgttgtacatattttggcatgtctcaaactgtttaggaaatagatttggtttaacagcatcatcagtattactatttcatttaagccccctcagagccattaatatgcgacgggctctgtaaaactctaagaggaagctacatagcacatgcagtgttttgcaaaccaattgaaccagagctccagtttttttggaataccgattaatgtcacgcagaatatgtgagctgtgggttatctgagttacatgaaacgatttgggaaaagcagatctatttctatgtgaatatttacagtgaatatattactcaaatgttaaagattattaggaaaacaatttttcatattatcttaacaatactactttaagcgttgattatcttttaggagaacacacaaatacttggttctagataaagcctgaattgtcatattgaagtatcagaatatagtgtaaataacatcaggagacaactttgagaaaagttaaataggttaaacaaacaaatatcaaaacccaaaaaagttaggtaaggttattaagcattcactgaaaattgccatgcatgttgttcacaaagaagttatatttctttattgctgcttttaaagcactccatgcctacagcagatgtattcctttgtttatctaatttctaatgttctgtttttattgcatctatatttaataaagtttaatgccttctacttctctccactttcatcatgatttattttttttcatctctttctcttcaaaattttcttcagaatagttttccagttgaaggtgaccacattttttctggtcatctaagatacattcaaacctctttcattataagaattttgaaaattaaaaatcttagtagaaaatcaaaagcatatgacactaattatatcctcacgtttgtcatccaattccaacccaatgagaacatttaatctgatattattagaagtgtgaagagaaggcaggcagagagagagaaacaatgacaggcaaaagctaaagagagagggaacattttttggacatcactaaaattgttagagccaagaaagctgacagaataaatcttgactgagtttgtagactccctaaacttgcttttcatgcttgtcaaggaatgtattcactgttagcaatatgtcctcatatattgaacaaaacactacatattctccaacccagaagtcagagctagtgagtttgtgacaatggagttttgtccatcatgaagatctgcggaaaaagaccatagctgagtgacttgatttaagatcttggtggaaaacaattcagacatacagttacatcactttaaagccatcaagtagtttagccaactgggctaagtctacagaggaagtgcaacaatgaaagctagctattacacatcatgaagaaaaaatatgcatgatcaattgacagggtttttattatgtattatggattattaggctgaggtgggtggatcacccgaggtcaggagttcgagaccagcctggccaacatggcgagaacccatctctactaaaaatataaaatttagttgggtgtagttgtgggcacctgtaatcccaggtactcaggaggctgaggtaggagaatcgcttaaacctgagaggcagaggttgcagtgaaccaagatcgcaccattgcactctagcctgggcaacaagagtgaaacgccatctcaaaaaacaaacaaacaaacaaacataaaacaaacaaacaaaaagtattatcaaatacattccattactatgcatttctctttcaccttcaaaaggtgactatagaaaaattcatattacctattccatgcgtcacaaatctaagggggtgctgtcttatgtcccccacatcccttcctgtgtgtgtgtagatcaataactatctatgcattcactcgtacatttacctcatccttcccatctatccattcatttatcctagctatacacctatccagtgaaaaacctttcacataagtcctgattttacactttatttcctaaaataaagactaattagataatgcattcttttatttgtaattttatttatatgatagtagaaaaatgattagttattgatactcataaaaacagattacataattattagtaaaaattgacagggactccacatgcaatattatactcatcaagtttagatagcgattaatggtaaaaatttctagagccaatatattttaaaggatcataagaactgatactcgtgatttttcatcccctgtcaaaagcaggctaatatttccaactccaactttttcaattcaagtagaaaatatttatactgcttttaactcgttttcaaaatctggaaaaatctgtcttctatgcattgtctagtaggatgatgatcttattattggtattatttggtttacctgatttcatgcttggtgaaatgtttgaaccaaaatcctagtaaaagacagacgcaactacttccacatcatactgaaagtaatcatcaatttatttagttacactgggggaaaacaccacccagtaaaaccagatttttccccccaggacaatcaaataaaaacctacaaacaagggacatagctccaaaagttaaaacagtccaaaatatgtattcaaacatgtggacaaagcctctttatttgtgcaactttgaaaataggtttattcatgtaaatcataataatacatgtacttaaattcaataatgttattttaaatggtcagataaaacaatactgtatagatatcatgaagatatctgtatattttcaacataattctatttttaatgttttttccagaaaaaaaaaattttaaaaattaaagacaccaatacaattaaagcaccatgtcataaatgaggcaggatctcagaaaatcaaatatcaaattatgaaaagcacctctcataacttctagaaaagtcattggaaaacaaactctgcataattgggatactacatttcttcttactaaaaagcaaattttatagtgataaaaggtacattgcaaaggacagaagtatttaaccaaaaagtaacgctatgaagattaaaatattctaagtcaaaaacattgaatgaaaattctatctctatcaccattccctggacatagacttaagctatgatttctcattagtagtaataaatgcaaataacatgttgagttaaaaataaatacaaatcgaacaaaaaatgaagagaggtcagataaagagaaatataatacaaattaccaaataagattatttttatgtaattgtttctaactaccactaatttatagtaattttattatatgctctggcctaaaatttttagccttgcatacatcaaaatgaaggataactaataatcaatcattaaatccctatgagcttgggccattgtctgcaatcatgattttgtgaagattaaagtttcccttattaaggttttcaactgtaataacataatactttatcttaaatcctttatcttaaatattatgcaaagaatatgtcaaagcaaataaagcatagtttgctagtcagaatggttcaattctttgtctggctctttccataactatttctataaactttgatgagtctcttaacttatttgcttttccaaatataagatggatgtaaagagtatatcctccatgatgttttgctgtaatgatccaataacattacattatggttattatacgaatgtacttaaaaatattttataaatcttaaaatgtcaagatcatttattgaacatctatctgcatagagtgttacaatctatcccatatcaattctgtaggtaaacagatttgagatatgatcgaacggtaaaataacttaaaggatgacagccaaataataatactatttgatgtttgagtgatttatagaaatatctagtatcatgttttatttcctgccccctcccatcactaataatattatttagattgtgattattttagaagagatacagaaacaaatcaaaattctattttttaaaaaagatgattttcctgagtttagctgtaagtacacaacacaaagttaaatagagaattcataattatctaattaaactaatacctttaaaatattcaaaccaaccattttagcagaaacaaacaataataatatttatgatcagaacctgggaaatccagatttgtcataagcaaacaacaacataatccaaatatttctactaaaggtggcaaagcctgtctctgtataccttttcaatcttaaacacaaacaatttctgtttggactccacttgaaaaccacttttgaagaagtttaaaaataagatttctcccaggaaataaaagacccacagtgttcaatgtttgacaggattggaagttaattaaggcaattagattttccattcatgtgtagactgccattatctttcttctaaataaaagattttaatagctggcattacctacctaccagaatgtttcacattgcttcttctttcatatactgcatttgcctacattgccacaagggaattacaaatcttatacattgtcaggatttacaaaattgagaaagcaagagtagggcaaggagtaaaaaaaatgctgtgaggcaaataaacaccaatagaagtaaaatagttcagcccaaggtcttcttaggtcagctaattttgagactacattttgtgcccaaatgcaaatttttataatattctgtagtccaaagtcaaaagtatttttcacatctttaatagcacaaagtcagaggcatttcataggataataaaaaatcttcccttcagagaattacacaaggatactctagcctactttcccaatttaaagataacacatttaatatgttattcccaaataaaagcttgctgaaaagcattaatttatctagacccatggaatagttaagaaagacgcaaatattcacattaaagtaataataattttgaaaagatcgttaatgaacactacaataagcaaactgctgtgttaaataaatgttatcaaacatagattgcaattgagtatagggagcagaatggaaaggcaagacttctgaaacaataaggtaaagaggacagtaactttttcctgcactatatgttttcctgatacagtagttcactttgctgcctaaagccacctccctccttcccttgggaaagagaaatatccaacagcacccttgaattctcctgagatttctatgagggaaccatcataaacagagaaaacaccccttagaagagcggcaggaaaagaagcaaaggcagattagcagtatcagacacagcagtggcaattttagtgccagcctctgatggggttctccttcgggacaatatcctgagagagtgtaccagtttaacctagagtagctgtgcatacttacaggcttctcagtaagaggagtagtgaacattatttgtatattcacacgtatactccaaggaggatctaagcatattaaattcttgaggatcatataagataattaaagaaaccaaacagtagatattttctctaactatattgcctgttctcaaaatagattatgatattgttaaatatggttcattatttagcctctttcttcctatttcaacagtctttaactcatcatacctacctcctctccctaccaagcaacgtctttgttgttaaatgaattaatcaatttgtgcatgaagtatcttgggataaaacaaaatagtggccggtgactagcagtcattggttattgagaacttatcatgtgctaggcaacggcttaatgacttaatgcatattaacacatttaatccttatagcaatcctatgaggcaggtgctattatcatcccattttacagatgagaaaaccggaactagtaagaggcagaaacaggagtggaagtggggagaatggctgcagaactcacgttcttaagcactatgtttaaactgcttctctgccatcaaagtctatttttggaagagagcatttggtatatattccaaaagcagaaacacaggcagatgaaaaccaattatggaggtaaacaatacctgcatcatgatatggggcacatataaaaggtaggaagaatgatgaactagcaggaggaaaaaataatgaacactgttactcaaaagggctaggcgattttgcctctatcactttataaggtgatttcacctttaaaagttcacagctatgagattgtgaacaaaccaaaagtgataaaaagattccattcctctttttttccactgaggcagagactgagggatattaatttccctgctcctggtcttcactgcagattagacaaggtgtgtatttcaagggccagggaggcagagccaccttccagttgaattttacagttcaggagggagtcccacagagtctattttccactaaactcccccagccaatgattacatttacttgtgctggaatatcatgacaacaattcagaaacattggaaactgcttggctgcatgtggaaacattataaggtctgatgatataaaagagaaaaatcacacagggagagaaaatgcatatccattaggagggcttttttttttttttaaacagagtcctcagtcactaaaagagataaaagccatgactcacattaaagcttccttgctctacagatgaattaacaattagcaaggggaagtctttcgttttggtctcctgatagctatctggactattaaacatgtgaggcttgcataggaaattacaaaggcttccctccgtttcggattcaagttgcatccaaaatacagttgtggatttctgtgcataggacataaccccaaagaagtctcttcttctatttttttcccctccacaatgtgattgactgctcttagctggttctggggatcatgtgctaaatttataatctgcactggagctgagattgcaatgacagaaatcggaatagccataaacaaaatatttaacaggagagatgttgctctaccaggggtaaggttgcttcatctgaagcatggagccctaatctatgacacatacaagtacaaattatgtcatctgcaacaggtgacaagttttaattgaatgtcttctgtctgcaattctgacaaaggtgaatggaaataaatgagtctggcaagacagccctgagccttacaatacccaatatctcattatttttaaacagctatctataaactgatgctgacaagcctcgaaccttttatttctgctcaagaggaggtggctgtgaagggggaaaaaaagaaagaaagaaaaggggcatccagaacattacattaaacatgcaatacctaccattatcacttccccaatgtaattaaaggaaatctcctattcaaaaggcactatttcttactttgcttgatgtcagagggagagagagagagagagagaacgagaatgagaagatgcttggcctgcatttgctgaacatagggattgtctttaaagaaaaaaggaaaatcttcccttccttctttttgcctgctaaaaatttcctaaactattgaaaaaagatactactatggttcatacatatctaaactatattttatcttgttactatttaagatgggtgaatattctctttatccttttcaaaattgctttctcatatgaataaagttatgaattcatgggtaaagacatgaaatggggttgtacatcaacatcagaagtgattctactaattcacaattaaatgtgacactggcagcaataagtttaacccaataataatagttataacagtgcacagcaccccatggggatgctctgtataaacagaagcacaaatattatttatgcaaaattcaatgccctgtaaaatgaattaaatatgaaatcaaccaagcaggtttacaagttgctgggttgagagcccacagtcactttggttcatttgatggaaatgaatatagtggaatatagtagagtctaatgatcaaaaaagcagacatggatttaaaatatagatttttttaaaaaaaaaggaaatagatggcagagaaaggtgccatatgagcctggagggcatttggtttcagcatatgtgaatctagatcatacgggcaaccttggaagagcctatgaagctcaaagaggaacttatggaaattctaataggggaaaactttatctctgagccaatgtgttagcaattcactgaagacaataaaatgtattaccagactggagcagaaatcctgagtgtgtcaattattagataccaaagagaggcatgatgtttgataatatttctctggtgatcattataacttggcaaagttgaaattcaaaataaagtaaatctagtataacgaatatggtatatgttcccaggtcatgtgtaaagagaattatacctctttaggaaaaaatgtttcctcttaggaaaagaatagttcaatagagattaaatgtaaatacaatacaagcgagagatgtcttgttacactgcgacacttcttatttcttgtaacattggtagcaataagtctacacagtcatagtaataataacagtgcatagcacccccataggaatgctctgtgtaaaagaagccccaaatattatttattcaaacttcaaaccccataaaaaataactaaatataaaactaagcaagctggtcttcaggttgcttggttgcaagccacagtctctctgtttatccaatagagagaaataaagtggagtctaatgactcaattgtaagtcttagtagaataaacaagaagtaatgaaggaacacgaaaaagcaattagaaggatactctaaaatgggttgattcagagtctgatatgaaatcaagagaatacagtggtttccatccccttctcaaccaactctatataccattactgaaccccattcatctaccaatggtgttcttaaatattcatgaggaaagttagcaaagaaaaaacagcagagattacgagagaaaaatataagttctgtagaaattcagaaattgaaaagaaaagcacaaaagattcagagcacattctcagctgccttgagacctgagctatccacagttgcctgtagccccctgagggcacattttcaagccaattaatacacagtttttctctcctagagttaacaattcaactcttgaggaatgtaaggtctcatgggagaaactgaggtaagagaattatgaatactggtgaaaataagaaatctatgtgtatatataaatgatgtatattcattaaaatgaacacaaatatgaaaatactatagattacagacacactaaataagcaatgtttcctgttcaatttatttccatctagcatcttttgatctcttgtatgttttcagaatctcaattctatctggtttcagtaagatgactataaattctgtttgctttgatgcacacaatatgcatacaaaaggcattatatttggacatctggattacaagctaaatattcaatgttatttttattttgctactctgagcaactaggtcttaatatggatccactccagattcacattaaattgatatatcatgttaaaggtttggaggagagttatacgtatgtgtattcatagttacatgtccatctaaacataccaaaattttttgtcaaagaaattaacagttgggaaagtatatactctgagggccagtgaggaaactgtacatgtgaagtattgtacatgtgaagtagggtgaagtccatagcctgtatttttgttctcagactgagtgaaacgtgtgaaaatatagaaaacaccaatgatatatccagacaccaaacatactgagtcttggctgaaaaaagtttgtatttgtaacaagtcatgaatttcctgacagacttccctgtgtattgttattatatgaggggttgtaggatgggcaattgccagtctagtcaacatgatcctcaatgcaaggatgcatctctaaattctagtgtgtgccaagaaaaaaacaaacacattttcccattcacaaggcagctgaaggctagatgttgagaatggagacttcaaatgtcactccctcatgtagaaggaggcagaattccccatgaaaatttccttgcattttccaaacttaaatttcttagtcttttctgtcaattgtctccctctatgtttttggaatatagaccggcctaactgcaaacgtcaaggtatttcatttgttacatatattcagcttaattccataaaaatttgagagtggagtgcatagtgaaaatgacatactaattgaaaaagctttgaaggatcaaaacataatcaaatgattttggtgtatgttgtaaagtgtctatacatcatcattagccatgcagtatgtatcacatgcctgctacacagtaggtactcaaaaatactgagtaagtgaataaataaatgtacaacatgctttacagccatgcactatgatgatttttgtttttcttttggtaattctaaaactggaatgtacacagacaaatatgaacctcttgtcaatttttttcagtaattcttgtttggcgtgttttcttaatgcaccagtgtacagtaaattaagaaaagtatagaaaacttgaagataacaacatatcatgaagcattgaagaaaaaaaaggagttggctgaaaggtagactcagttttattttttaactattcatcatagataacataaaacagcatttgatatgctgtgaaaacctcagttagatattaagaagaactgactaatgagagaattatatttagatactgaatattgaacaagaaagatcatagattgctatacttgggaaatttgacaaatgagggaaaccattcccttcctgagacatttttattgctctcctgcctggaagcagatgaatgagtttgatcacatgttaagctctcttccagttctaaaagtctatgaatgaaatggtgtacttaaaaagatggaattgacccacagattcagagtccaacaactgccctggcagttggaaacatcaacatacttcatatcttaaatcagggaagactggagccaaatggatagcattaatgaaacagaagagcagaagcctttctggcacaggttttagcgttcccctcacgctgaccttggccaaatgcatttccttttgttcttgatgataataaagcaaataaagtgcccatgtttgaaaaatgcttctagcttattattgcattaggaaaagatcaatgtctgttgcacatcactatggaaactgaagtatgggaaatcatatacagcttcagatttgtagaaatttacaacatatagacaaaaagtgagctgaggaggatatgactaaataacatattttgaaagcaaccaaagaatagataatgactgttctgttatttagctgaattccatctaatgtcttaaaaatcaaaaggcatttggctaaagatgaccagatttcattaagtatgccacaatggtgaaaattaatgtttcatctcaacatctacagtcacccttttggcagaaatcacattatgtatagatatatatgtatacctctgtatatatgtatatacatgcatacttgtacatatatccacacacaggggtacatacatagagataaacataaaaacacagacacaatcctaaaccagtaagacattatcaaatttctttatttttctgataatgatttggcccagccacacgattctgtgagaattattcatttgcacaagtttccctcccaaaagaacccatgttctatgagtttacattagcatttacatcaagtcacaaattcagacaactacagggactacctacacaaagtgagtgaatgaaagggactatgtgtttaaataaagagagagagagagagagaaaacaaaaacaatgggcatgaactgtggtgaacccaagagcatttacccccaaaggacacagccactgctcagtgccagttagatatttattgccttgtgggagtggggtgggcaatcttgaatgtgagttcagtgttatcagagtttccactccgaaaagaaggcagcaatccagatctttctataaaatcatccgatgtttaagtgtttcccaaaaatgtttgctaattgtgtggccctcaggccacccgtttctagtctttggtgtctataccaaagttacacaggggctaaatgttagaaatttcttgatagaagtcaagtttgacaattggctggttacattataagttggtcactatttagaacttactcttttatttatttaggccctccattatatctgcatagattaaattacctaactatttaagttgttctataggctacatcttgaaatcctgattttaaaatgtgattttgtagggctttaagtataataataatgtataaaatacatgtgttttcattagaaaacatttcaaacaagagtaaaaatttaatcacccacacatccagacctagcacctgttaattaagaaagctgacctgttttggtccaaaaacccctcctaaagaatttcttgctaagctctggtctccactggtagttatagcaggtggcaacaaagggtctttaaattcatccattgtgtttactaaatgttttcatgctctgaaggaatgtctttttgccaagtgaaatctgttggaaactgcaagtcaattcttttctttttttttgagacagagtcttgctctgtcacccaggctggaatgcagtggcgtgatctcagctcactgcagcctctgctcccaggttccagcgattctcttgcctcagcttcccaggtagctgttattacaggaatgtgccactatgcctggctaatttttgtatttttagtagagatggggtttcaccatgttggccaggctggtctaagtggtcaattcttaaagcacaagtggtgagctccattttcattcagattacaccaagttcatcatcactgataactagctgacaaagaatttttcttctgttggcctggacactttttctctaatttcttgcattgtatgaaagagaaggtctttgaagtggcaaaagatgaaaaggatcctaaatgctttttggaacagtctaggaggaattcggttttaatagtgctttcttagggtttgtcaatcctagagtacaaaggagcggaagaaactgctagaatagaaaacctaaagtggtgggagaatgggagaatggccaggaaagacttcatgagaaagggggaagggaaggaaattaaaaagagtcttgagtgtttgaagaaaaaaaaaactgtaaatttgaaagaaggcagtaaaaatcatttttctatcaactttcaagactatgcaggcatattatgaagaactgcccatatgccaaatagcacattacatagggtgaaaaaatgaatctttaaacaggacatgacacatactggatggccagcaatatatcctagaccaccagaatattagtatcattgcagctagagacagtaaacatatgaacttgttagcaacagatgaaagtcatatgtgtacacctactgaagtcaatggttattccataattcctgtcaatgccaaatcacttcagcaaggcctctgacagaagtactggcttctctcaatgtatgtatttcaaaaactcactctacaaagcctctcatctctgctgccattgaggaaactagattggaatccccttggaagttgtcattgcagtgccctcatcagtcaagaaggttgctgctgggcagcatgaggcatcccctccctctacaggggcttcatggctggcctcttagcattcagagtccctctggctgaataaatgaaagactgtgaaattgaactcaagttaccatacagtaggtaaagaaagcacagaaactgggccaccaaagcagcccaggaacatgctttaatgtcataataaagacatacccgagactgggcaatttacaaaggaatgaggtttaattggacttacagttccacgtggctggaaaagcctgacaatcatggtggaaggcaaggaggagcaagtcacatcttacatggatggcagcaggcaaagagagagagagcttgtgcaggggaactcctctttttaaaaaccatcagatctcatgaaacttattcactatcatgagaacatcatgggaaagacttgaatccatgattaaattggttcccactggttgcctccacaacacatgggaattcaagatgagatctggatggggacacagccaaaccatatcaccatgtcataaaggagagagcatagccaagagttaatatatgctttgacatgaaaatacatagaaaagccattcttcctctcattctcctttccttccccactttggccaaacactttaattatgtatatacatatagggcttataagatctttctaaactaaattatcttttttctaaaccaaggtgctctctgtttttttaattctatttttttaaaaaacttacaattttttttttttttgagacggagtcttgttctgttgcccaggctggagtgcagtggcgtgatctcggctcactgcaggctctgcccgccgggttcatgccattctcctgcctcagcctcccgagtagctgggactacaggcgcccgccacctcacctggctaattttttgtatttttagcagagacggggtttcaccgtgttggccaggatggtctcgatctcctgacctcgtgatccacccacctcggcctcccaaagtgctgggattacaggcgtgagtaactgtgcccggcccaaaacttacaagttataaatgggaaaaaacataatacatctgtaaactcttctgagcattccttgcatagccactactcaaattattccagattttaaaaaatttcccagcaataataagaaatttaagatcctttataacttttcatattacttctacatgtactttacttgctacttataaaatcaaggcgaataagaaaggtactagtaacctggtgttacagatggggaaaatagagctcagctctataattccctatattttcctccctaatttgatttacttttttattgctgaggatatgattggagaatatcaatgtgtaacagagtagttttaagaccagctgtctgctaaatgatggtaagtattaaacctttcagatgccatagggccaaagttattcaataaaaattcattgctaacaagaatgaaataaaaatagctggaattattttaattattggctctaataaagtgagagttcattcatctatcaatacgtgttcagcctgaaattgataaaagtttaaaaagctaattaagatggtaggggtctagtagaaaggttaaaaaaaaatcacctacagaaaatattgcttgacatttttcacgattccttgatgagtattacggattttgtttttcaaggataggatacatttagggaaatatggaaaaataaagaatatggcagagctctatagacttatattaactcacatttagtaaactgccaacatcctcttaattttcatgtaaaatctttgatgtggaattgcaccaatgtgttctctaaatttaagctgcagtctctaagtttgactcataccttgcctatttagaagagaacaaggagaacagatttgaatttagaatacataattgtaaaatttctcttgaaatcaaaaagtaaaaactaaaagagtaaataaatcccaaaatattcactgaaaaaaaaaaatgggggaagaaatctgatctaacatctttgagaaaaatgactcttcaaaggaagtctacttattttaaacaatgtcaaaacagatgtttgtggacagttgtgaataagtttaaaaaatcattatgacatattctattgaataaggcaacataaacagaaaaataggcccaatcaaatcatataaattttattgatcctaataactgattccaataaaaagtacattaaaatatagctaaattttatatttaaaaagttacttttcccagcattttgggaggccgaggtgggcggatcacgaggtcaggagatggagaccatcctggctaacatggtgaaaccccatctctactaaaaatacaaaaaattagccaggcgtggttgtgggtgcctgtagtctcagctactcgggaggctgagacaggagaatggcgtgaacccgggaggcggagcttgcagtgagccgagactgtgccactgcactccagtgtggaagacagagggatactccgtctcaaaataaataaattaattaataaagttattttttaaaagtcttagtaaaaacaatatcccacttttcatataataaaatggaaatttaaacagataattcacaaccagagtaatgattctgtaagttaaacattcaaatcttcatgaacttttccaccctccagtattgtataagcccaatttctgaagttacctgggtctcagtttctttaccaaaacaaattttagcataattttttaagacgctggaataaaacttacttctacaatatttcaaaataaaggcttctaaagaaatcatcgtcatagatgaaagaagcacattttgtaaaaataatagttaatgttttctgttaaatcaagcttaaggtaaattaaaagcaaagttaaaagtttcattaattttggccattagaggaatgggctaattatttccgaaatataatatgtagtaattaaacaactactaagtgaaatcataaagcactctgtgtcaacttcttctcatacaaagaaactagtaacctaagtaacttttgggctttttttttttttttttttgagatggagtctcactctgtcacccaggtgcagtggcaccatctcggcttactgcaacctctgcctcccaggttcaagcaattcacctgcctcagctccagagtggctgggactacaggcgcccaccaccatgcctggctaattttttttgtattttgtagagacggggtttcaccatgttggtcaggctggtctcaaactcgtgacctcaaatgatctgcccacctcggcctcccaaagtgctgggattacaggagtgagccaccacatctggccaaattttaagctttcaacactttcttttatcagcaccaacataatatttaaggtgacattttatcctccttgaaacttcaacatctgctgttcaacaaatacctgtattatgagtaagtgtttaataaataatatcacattactgatacttcaatacaaattagacattataaatcctatatatatctgtgataaaatgacaatggaagtaaaatagctgtatatttcatgtaaaaatttagacatacattccatagtatgtctatgaaatagacaagaaaatcatttttgcacaattataacttgtttcacaatccgtaatgttgcttcaaacttataatttggaccaaaatggaattacatctgaaaaatctctagtgcatttagtaatggttagacaatctataccttgattacagtatgtgcccactctgaactttaaaaagaaggaatagcaattttatagtaatctgataaagaagcatttggacctttggggaaagagttaatgaattacagatctgaaaccgggtttcatggattcactgtgaactttcattctaatagttaaagtagatgtctatcaaattgcttatgaggacaaatttatggaaaataaccaagagtaaagctttgttcttattaagaaacatgaatatgtatgtaattttagccagactaaattaacccaaaaatgaataaataaaaaaaggacaataattgttgtcacaagagaagacttgtctcccttccccctcttagaaaagcatttatgctcagaatttttttaaaattcacatttttaaataaaaccatttggaaagaaacaaaaggaaaagaatctgcaaggaaaccattaaggagtaagaagcatgtatagttcacctccttagtaataaaccttcttaaaacagggagagcctgcagtttaaatacagtgcttgatataaacataagacatgaaacttagtgttcatgcaagcagtgcattattgctgaagtgtgtcaattttctaagcatgactatttagaaaggttacattgagtcatcaatcctaattctacattaaacatcttgtgaaactccatgtgctctgaacagagtaagatcctattttagcagcaacagtataaataggaagtaaatataaaatgtatcacagatagtcctgtgaatttttctgtgtctttttgtgggtatggtacattaacatgtattccccctggtggatgctcaactaattatgtgaaccaatatcaataaataagtgaagtatacctgtgacttcacctttattttcaatctaacgatttaacttgatggatgtccattgataattagggatttcccatatgaaattggtactatttgagtttagcaaacttacaaattatattgctattatgtctcttgttcccttgggctactgattcttctgtaaccttttgatttgcaaagatctgagggttaggagctactacaacaaacaacaacaacaaagccaaggcaatctggactgtttttattaataaatttaactctggcattatcaaacataaaatagaaataaataactataattttatggcctttatgttctagatatttcaaatatactagtcatcagcatttcaaagactttggaataaaatcagttattacacccaagcgattcgttaatgtttacaaagcactttcatagatcatcttatttaattcttacaattctgtgctgtaagtataggattactatctctgctttataggctcagagaagttaagcaattcacgattaatactctgcacctgtttttctaattccaagtcctctttaaagagcatcagtactatcatttgatatctccattttccaaaactctaaacaaattttttaataagaagaaatagaaaaagaagggaaacaaggaaagcagataattgattcattgattctccccacccccaaaacaagcgctttgggaatctatcgggtacttctctgaggactttcagtcaataggaacaaagtgaaaggcaagaatccataagccaccaagtgtgtatcattaatattcatgactgaaggtgtaaggaaaaagaagatgaagtcaaagcaaatgccaaaactcagattttaaaggaaagaaaaacagtgcacctgaccaaaatggaaaaactggaagatggaatcagtttctaaagaaagataagaagtatggttttatacttgagatgattttgagaaattcaagatgtattgcacggacctcaaaactgaaattcaggtaagaatgcaggactactgctgtaaacttgagccaccaacatagatatatgaaaatataagtgcagatttgctttgcaggacgtagaacaagcttatccgacccacaagtgggccacatgtgggctacatgtggctgaggacagctttgaatgtggcccaacacaaattcataaaatttcttaaaacattatgagaatatttttgtgtttattacttttttagctcattagctatcattagtgttagtgtatttcatatgtggtccaagacaattcttcttctgatgtgacccaggaaagccaaaagattggatacccctgatgtagaatgaaaagacaaggattaatcttggaaaccagtcataaatatagaagagaagcaataagtgtaaccagagaaggaaactaagaaaggatggagaaaattggtgactactgtaccatccaaactaagggaagagaaaccattaagaagtgatattcaaatcccagcactctgggaggccgaggcaggtgggtcacttgaggtcaggagttcaagaacagcctggccaacatggtgaaaccccatcttcactaaaagcacaaaaattagttgggcatggtcgtgtgcacctgtactcccagatactagagaggctgaggcagaagaattgcttgaacctgggaggcggaggttgcagtgagccgagatcgtgccactgcactccaccctgggcaacagggtgaaactctgtctcaaaaaaaaaaaaaaaaaaaaaaagaggtgaggttcatagaaatttagcccacaaaatagagagagtaaaattgaaaaaatatatataacagcaatttaatgaaaacatggtgatattactgcaagataataaaacttaaaagtgagtatcttaaaaatagtataaatgcatattctccaagatgtttctttttcaatcaatcctgatgaaaatatattcaatatcacagatccttatctatgccaaaaccctctaacagtaatggttgttgattattaataatatgactaatatataataatgcatcatattataattaaactagaaaaatgttagtagtctagtatcttctagaaaaaccacaaagctacatacttcaaacagttctaagattcgtggtatggaactggattagttttggtatttttgttgttaaattccagaaaaaaaactcatgagataccactctagagtgctttacactgaacattatgaacataaaccatacaatcaacactgatttatgtaatgatgtcacatatgttaagaacagacaaaataatttggatgaatacatttttaaaaagtccaaactggcttcttccctcctctctgtctggaatttaagaaataagaagtctactgaaatcttacaccctgaaaaattgtttcacttacgaaggacattaatatgctttctgtgctaaagatctggttagaattttggagaaaatgaaggcagaaggcaatagaattgccaaaaagactgagtattattcagtaatttcaagtctttagacagtattgtgagagtatgggagaaatgtaatcaactacaaacccggttttgtttttttttaatacaagaaagtataagccacaagacagtatctcaattagactccaattcaataactaaagaaggggatgataacgtaagttcctttttctatctcctaaagcttacactttgttggtacatgactttctaagcttaagctttactgacacatgaccacaaccctgcgataaggtgatgttccatttatacaaacaaacaacaactgtggtatcataggaagatacttggtctttgtccctggtttctggtacagtgctcctaatgcccttgaaatttcctgagtgaaaagggtgaggagaacctctttttttctaaagaattgactcttggcaggcccccagatagcttcagaattagggctggtcaccagaaataccaagtcttgattaaaaacttagaactttcagccacactcccatcaacttccaaagagaagagaaggactgaagactgagttcatcaatgatgaccatgatttaatcattcatgcctacataatggaaacattgtaacaccacctaacagatggagctcgaagagcttctaggctggtgaacacatcaacatgctggaaggtggtgtgccagagagagcatggaagctctgtgcccctcccagtcaggcttatgggactgagctctttacatgtgtgacctgttgctagtagcattgtagatagcatcagaattgaactgaagtactggatacccagttggtgcctagagaatcagagaactgattgttggtgtttgaaaacattcaaaaacaataacagtagtatctacatcttggtttcttaatttcattttataccacaaataaataaagctcctgggagacatggctgacactgaggttgtggcatggaacatacaaaaccagcctggagcatctttttgtgccagaaaagtaagaaaatgaaccaagagttatggggatgtgtcaataagtcacaagaaggcagcttgaaggggctctctctggaaaaatctgggacaatttgaggatcaaaataaataatgatagcaatggattataactcattgaataaaatgggaatccatcggtctaccttgacataaataaataaatgaataagctgatggggaatggaataattatagtctcaatttatcgcaccacaaaattcttattactctccaagggggaaagagcaactttatagtggaaaagcctggtagatacccccagtcaagtgaccaagataatgtcatcagtaatgagacaaagggcaatttgtgccatctgatataatgcgatgagatcactgcatcacttctgtgatattcctgccaaagacacataacctgaatctaatcacgaagaaacaccataatagcccaaattgaggaacactctacaaaataactggtctgcaatcttcaaaattgctagtcatgaaagtcagggaaagaatgtcaatttaattagaaactcatattttgtgtcaatgaaattaaactggtcttagaatttccagtaatcctttgaatatctttatttttacttccttccatgtggctcacactctcttttcttttattctctccttttttccttatttttccttttctccagactccaaaaagttactgttgcctggaagtaatattacctccagtggatcttgattttctttttccacacctcttatattttccattcattttaatggcactgacattgctacaatttcaagatggtgctgtcatctatctttttttttttcttctggagatagagtcttgctgtcaccaaggctggtgtgcagtggtacgatcttggctcactgcaacctccacctcccaggttcaagcgattctcctgcctcagcctcccaagtagctgggattacaggcatgcaccaccacgcccagctaattttgtatttttagtagagatggtgtttctccatcttggcctggctgttctcaaactcctgacctcaggtgatctgtccacctcggcctcccaaagtgctggaattacaggcgtgagccaccacacctgggctggtgttaccatcttgttataatctggcagaggtgataatttgaaggaaatttgtgtactgtttttcaggttatgaagcacttcatctagcttacctcatctgattcgcatatttattgtatgagataggtattactatgtttctcattttaaaaatgaggaaggtgaggcagattcaatccattacaaggtttgtgaattacagtgagtacttctaacatcagtactacacagctgtcttccctacatacaggggactgtttgcatttcagcattatcaaaaagaagaagaaatctattagagaaagaacagccaccgaaataagttggtattgttcaggttgctcaatgtgaatgaataacagtcactatgccatctcaattaatgaatggatgactgcagtaatctatcttcttttccattgttgcttagctttttaactaaaatggacagtcttctattgttaattgttttctttttaaagaagagggaaaaaaataaaatgaataaaatcaattatacttgttggtgaattccatatatttgaggcacaactttactgttttaattaaatggaaatataggctcattgttttaaagacaataaaaagacaattcaaaccctgacattgggccttccccatatcccaaccccatctgttttaagtggaacatctaggacaactaggctaaccacggtttagaagattagattctgataacagccaattgtaaataactacctgcattctaattattcctctaaaaatccaactaataacaagtccactgctctctacacttctgtaaagtttgaatcattgtctagtttgaagtaatctggtaaggctggcaaatgttaagtcaaaataaactgcatataagttagaacggattcccagtgaataattctaggatttattccattcatactgactttttgtgtgtgtgttggggggaacagtttctccctctgtcacccaggatggagtgcagtgatacgatcatggcttgttgcagcctctgcctcctggtctcacccacctcagcctctcaaaaagctggtaccacaagtgcacagcaacatgcccagctaaattttttttattgttgtagagacaggggtctcattgtgttgcccaggctggtgtcaaactcctgggctcaggcaatcctcctgcctcagcctctcaaagtgctgggattataggcatgagtgaattttaatagtatgaattctgaaactcaagagaaacctgttataaggaaacttattggcataaagaagcaattgtgacttcatatttatgagagttgaggtcaaattcctggttcatctcttctcagatgtgtgccctttatctctttgggccttagcttgctcatatgtaaaatgggggtaaaaatactatgtatctctcagacccatgatgtctaaatgagatgaggtgtcactggtacaaaacatgttcgttattgttagcatttacatttgtattacaaatataaatactctcatctctggaaatgaatgtaatctagagacaataatattatttaaatttctttgaatactattccaaattagaatattttaaggagagcaaaatgcctgagaatatctatttgctcagtattgccatcagccctattgcatggccagggatctactctagagggaagactttaggcaaactgtcttctatcaaccctgccttttaaagtggtcctctacctccatctcatcagctcactggagcactcagcatctagaaccagctagtgaaatctgagcactcaattaacaataaagtgaagtgaaaaaaatggtttgagtttgaatcacagctctatcgttttcttgctatgtgacctttgcatacatagttcattaacaccattatcaccttcctcctctcctggagacttaggatttagaaagacagcatcactaaaagacacattacttggcacacagcagtcactcagtaaatattaattatctatggccttcatttcactcccttctaggaggatgcacataagaagaaaacaattgcaatgcaaagaaattcgtctttagtggtagaactttgggactcagtagtaccttggtagggaagatattttgaggcctggagtatttctagcatctgtcatatcacaagaggcaaccacttcaaccatcctgcagaaagtagactatggctagaggtgatgtttctataaactccccaaggaaaaattctgcaagtacttgtgtgagagcaggaaatctatctcccttgctctatgaaagaggacagggactttcttttctagacaaatgtttgaaaatgaaaaaaccagtatgattaaaactaaacattacatagcacatttttaaaatgtttaatgatagaaaacatagctcattttttcaaagttgatattattacctgggaaggcttacttatgtttaaaattatctagtgctcatggcactcagtgctcatcatgttaagaactcaggttagctcaaaaatgacagggcatgatacatatagaagtaggaaactccaacatggcacagctgctatattcttgcataatcaattatgattgaatttatttatttttccacttgataaaatatattctggaaatgcattgagaaacatgcacaaaaagaacctggttaaattattttaaacaattaaatatcaaataattcaaaaaataaactgctagtatcaaatgtcaaatgcataaaatgtcaatttctcggaaagggtgcagcacatttcatttctattatgcttttagcaccttttctctatttctagagacaaataaattttgaggaagcctaattagctgtctattcaagcacaactcagtgaaaaagctaagggtattcttggctgtttcctctcaacttctgattctttagaatgctgaatttatgcttaaactccctcaaagaccctgggatcaactgccaattttattttctacaatgctggattatgaaaacacagcatcaatagcattttttttccacataattttggtagaaaaactataggactttaagaataaaactcagcaacaagttgggtgtttttagcagtgtagaagaaaagacaagggtttattgccatgtttcatatgcatgattttgatgcatgctgccccaaagccaattcaaacagcagtcagggactgcagcaaattcatttactctggagaagaacatgggtttcttacgttgcttccaacttgaacaagccccatccctggggtcaactggctcactgagaaagtcgaatgaggaacaacataaaacacgatcactgctctagttttccctaaatgctctaggtagccgtcactttaccctgtgtacaccgcattcccttactgcccaaagtaataaagacttctgtcactgcgagagcttttcatcttcagggcttctttctcctctcctgataagactgccaactccactctctgtaaatgagctcatgtgaacacttcattttcagtgcgtgaaaacaaaaagggccactgcccagcttcagagatggagggggcagtgctctctcttcaaagtcagaggaggatgtttgaaagggattgaaactgacctagggagcctcccgtggaataaggaagttaaagcggagccattatactcctccgctagcttcacttttattttacaatgcctgaaggcttgggagtgcagggagggagagtgggaggagaacagaccagctatctctaaaccaatttctgtttgtgaacattaaacatttgcattcactttggccaacaccactagccaatatcaatgctccaagtatatgtgagctgaacgtttcacatgtgggacagatggctaaaccattacaatgcagtcaatttcgaaataagtgaatcccagcttaggcttcctcgtccaaacagtaactaaatttaatttttttgcaatcagtggcatatgtttgcatctgtctacaatatgacttgggccaaatctgatctggccatggcatcctgagtactaaggctatacaattcctagtgttaaatgtattgtaaataccagagggggcaggttaattaattaaaaatatatattgggtttttttggccctttggagatctaccatgtttgtgatacaggtaagagctgctgaccaactacaggagtttctgttatcctttttaaatgtttaaaatttccctatccaataataataataacaataatagtaataaacagaacccacatttacccacatttaattgtctattacagctaagagaaattggctttacctgttggcctcattatagtcacccaattccatttattcaaatgtgtacaatgtgcttattacgcaccaggcactgtgctaggcatgagacaataccagagcattctttccagggctcactgtcacagtcaggccggtacacaggaaaataattacagccgtataatgcttgcattttaataaaagcatgggctagaccctagaaggagtataagaaagaaaactgaactctttctggagaggtcaaagaaggaacttgggcatcactgtgttgagttgcgaaggtgtctgtgcatgaagaagatggaaggatatttcagtcacagagaacagctgtggcagaaaagcaggaaaaagcaggatttggaactgtgttttctaacatgtgttatgtaacttaattaaaataaaataaaatttcaaatgctgctactcaggtaccctagctgtatttcaaatgcttcccagtcacatgttgtcagtgactatcatattagacagtggaatcatggaacactcccataactgcagaaagttctatttgacagtgctgatttggaaatgtggattactgataactgagatactacaaaatgtgaaatgtatgaagggacttggtcctgtagatcctgagaaatcactcaatgaaatggagatttcagcttataatacttctagagccactgatggatttaaggagtgacgtagtgtggataaatgaaggggacagaaaatgagtgacttgatcatactcgtattttagaaagaccttcattcaacctacagtgtgaagggtgacacatatgtacatccacattcacatacaatattccacagtatacctatcaacccatataggcttttcccttctttattgtttcagtgaataataataacaataatttacatttattaaatgtatattgtggaacattcactgccctgaatacttcatacatattaacttaccaagatcaaggaatggaagggcatctttgagatacatgttgacttctaaagaccaatagttcaatttaatcctccatttatattgttttataggaaatatagaactgtgaatagaaaaactgtagagaaacacatagacaggttgaatctatggtgcaattcatcctgccagctaaatttaagctctaagcaggtttagcttggaacctctggtggctgagtggactgtggctgctacatgtatctgcaaatagatgtggcatttgtgggagtgccaataaaaatctcttgaactgcattaatgggaacttctctatatagaatattcaacaaaaatcgctgaaagaaattgttcatatggaacaacccaccttgtgagactgtaagaaatgaaaaaatggaggcaacaattagaagcaacaatgagcagggaattctccagtgacctgcatcttacttaaatggtgaattgaggtggctggatgtctggccaaatctcagctttctttgttttcttgggaagggtattttgctcaccatcctaatcacttaaagtcatgctgtgctctcacagcaagtcagtgaaatatgctttcttctttaatggctaaaacttgatccaggtttggctggaaaaaaaaaagaggcttgatatggtctgggatctgggtttgcttctaagctatttgtatacctcatcagtttcccataattcactgagtcagtcagtcaaaaagaattaatttaatgcctactgtgtgcagagaagagcatatggtatacaaagacacaattctgacactcaaagcttttgaaatctaggtaaggaagaaaacatacctatagaaagaaatattaaataatcaatatttaaaataatatgttataaattgaatgcttgagtgcaagagggatctgggaacttaggtgaagttatgggtatggtacatgtagttaaaaaagaagattatctgaaggagattggttgcaaatcagattgcaaagtgtcagaaaatgaaaaatattagaggtttagatattcatagggggttccaataaattttttctgatttattttataatcaacccacaattaaagatcttgaaaatttaaccagagacacaagagatgaaatataccaaagctagtactggttcacaagtcatttcaaaagaaaaagtaaaaccacatcagaaagtatatgtcctaacatctcacaacaagaagaactttacacagtgtactttccttacaatttcttgaagctttgctatttacaatttctaatataattaatggggtgtttattatgcttaatgctaaaaatcctctgatctaattttgaaaatgaattattccacttaacaaggaaaaaaaatcctttcgatttttacccaagtgctacagttctccaagtattccatattttcagctattatccctttcttacaaagagcccacttaataatgttcactctaacaacctcatttattttccagaaaattaactcagtttcaaccctgattaatgatttcatctaaatgaatcaaattaaaaattgaaaattatatttcaaaagccaaagaaaaaaaaattgaccatttccagttaacaaatgatcctttcaaatattaaaagatgaccatgaagagtgcgtgatagtaatgaaatctggctcgggcctgctgcttatctggagttcatggaggaggagaattaacaggaaaaaaaaaaaaagaaagagaagaaaaaggtaccctatgcatttttaacacggaaatcccttgggacaccaaagtgacttccacttaggcttcgcctataatcagtgtaccaaaataatatgagcatttccctgttaattaaaactgggctggagatgcccctcagcagaagggggattaagaagtcacacacactaatagcccctgttaacaaaacctaaaccgtgcaagaatgcttcatgctatgatgtcttctctaggagccggaagcagtccatgaggaaaacaagcaactaattagggagaaacttctggtctgatacgttatttttcttttaaatccattttggccgggggttggggaagggaagggtgactaggcagagcagagaggatttttaggacactgaaaccattctatgtaatactataatggtagatacgtgtcattatacatttgtcaaaacccacagaatgtataacaccaagagtgaacccccacataaactatggacttctttgggtaataatgacgtatccatgcggattcatcgattgttaacaaatgtaccagtctactgggaaatgttgataatgagggagggtatggatgaaggggggcgggtcaggggatattaactctgtactttttgctcaattttgctgtcagcctaaaagtgctgggtttttgttttgttttgttttttaacttttaagttcaggggtacatgtgcagcttgttccatgggtaaaattgtgtcatgtgggtttgctgtgcaggttatttcatcacccaggtattaagcctagtacccattagttattttaaaaataaagtcttaaaaaaaaatcccaaataaataaatccactcttgaggtatacagatgactgcatttatctgaagtcctgtgaaaaaactttacaattagggaccatgtcgttttcacccagatttccggatgtaattccgtgttttgaaatgtacgcacaagagtaaacaatgcagaatgatcagcctcacagcgggtcacaggacacaaccgccgcgctctggttggacgcaggctgcatcctgtttcccggacacatttattcagcccaatctttcctgtctgaacacagactgttgatgataaaatagcatctcaaattatgagggagaaagagctgcttcggcgttcctccccggttctctgcctggattgggctcccgtgggttgctgaggccctcgcggaggcctaggaagcccggcagcgcgggcggcagcagcgggttggggagcaaggccggcttggaacgcgggctcctgcccactgccacccgcaggctgccccgggctcccgggcgggcgctcggccaggggctctgctcgctccatggacagctgggtggaaaggacgccccgtgaaggacacccggccgtcggaccgcgcccacccctgggcctcccaggggctccctccgcagactcccagggacttcctgggagccaccgcggagggcgctgcgcgcgtccggagccgacgccgggcttcaaacagaaaccaaagcccgctccaacgccgcgaaggaggggggctccaagcatcctagaaaagaaagctggagggagcgcatcagagacacaagtgcggataagacttaacacatttcctgaagaggattccttgtcgcgagttgtcttggttatgacagaggaagaagacttcaaagtgaataagcaagggggtgcccttaatcagggcagaaatgtggtggctttgggatttacctatttcgtacaagttgcgttcttttcagtggcgtatttcccaggtcccttgcaagagctgttggacccactcccctcttgcccacaagttggaatattatttcattaatcacaacaggaggcagatgttacttaagatttagaaagagaaataaaggcatagatgaaggggcttgcatcaagttcaaaaaagagtattatgtttatagctccttaattattattggttatctgccaggctttctataatatactttgtaacattctggaatttttaaaaagtaccctacttatctttaaacactgaaatccattcaaagccctacaaccgatagggcctttgggagcgttattaaaatcctcttaattaacaacaacaaagtgaaggcttaaaatggttgaatgacttgcccaagatcacacagctaggaaataagcattggataaaaatgtatggaatgtctgagtaaatcctagcctttctgtgttctacttaaattcctcaattttaaatatagttgttatatcacacacagttaggggtattatccccattagcaaagaaagtgccgtagtaaaggcagctttcaaaattttcagggattttgtagaatcactgaggagtaactatgttgtacatggttcctcttccattacatttactagaagaggctaaagggtcacacaccctcacttgtcatgagcctgaaagactttgtgactgttctaggtacatacatgtaacaagcttttgatacaaaacataatgcgaaaaataaaatgttgtttgtgaaggcaaagattcatcaataccaagtataatctgtttctttacatttttcaaacaataagactgagataagaaaatcagaactagggccaactgtaacaggtgctaatagaatttttccatgaactattgtgtcagtttaatccccagcctgacctggaacactttggccattttaacaccaagctccccggattatctattctgagttaaatgttcccaagtggattggtgattgtgcagcggagagaagatctgcaaggattattctaaaatttcacaagaatttccctgacatacactatatattactatgaactatgttttcaaaataatgatacaatgaattgcctagccaagcaacatcttcacagtttaaccgaacactgaaatgattttccacaagctcaatgttcagaaaataaatgcaaattggctataaattaatttagtctttaaattaatacttgatcaataatctgacattgttttcattgtctacatgaagaaaactaagacaaaacagtttttcagctgtattataacttagtgttaaactacatctatatagccccatctatatagatggagagactcttttaattcaattgctatagatagcaaaatctaataatagagatcttaaagcattatctttttacttgaattactgaatttagttgctatctacactgatcagaataccacattaattttcttgattttatatttgatattacaaaaaatcccattttaatgattaaagatgctgaaatgacatttttgaatgaaattaatctatgtagcttaaaaatatttcattttcattagcattccctcttatttttttaacaataaactccttattttaaaatataactcaaagcccatgttctacacaaaatttttcaaaattatctcaggcatccattctccaaaagactgatacaatctgtgaactgaccctaactttcattgaagtagcatgcaaatatttgttataactttacctatctgccttatctggtttgacttagctagatgtggaaagatttgtacttaatcctcaccagaaaaaaagacactattgaatgctaaagaccctgtgaatattctacaaaagagctttcattgcagatcagtttaagtcggagacataagcaaaagataaaaaaccaaagacagttattcactgacctcagtaattttcaagccattctataaaacttggagattcccattaaagaagacagaaaaatcagccgggcaccgtggctcacgcctataatcccaggactttgggaggccgaggcaggtggatcacttgaggccaggagttcaagaccagcctggccaacatggggaaaccacgtctctactaaaaatacaaaattagccaggcatgttggtgcatacttgtaatcccagctactcggcgggatgagatgagacatgagaatcacttgaacccaggaggcggaggttgcagagaacctagatggtgccattacactccagcctgggcgacagagactctgaatcaaaaaaaacaaaaaaacaaaaaaaaaaaaaaaaaggaaagaaaaattgtttaacttatgccatcacaccctagtcacacattctagcatcctgtgaggaaatgagggcgtgacattaaaagaaagagtgtacataaaattaggaaactgcggttccacctgtgttagagtccagacagtgaatcggaaaccacagtaggcacttcaacagggagaattcaatatgaaaactttggtccaaagggtgttggagaattacaggagcaaaaactgaacagggattgtaactacaggaagcaactactgcctctggaaattgtgggaataaaaggaagtgttcggcacatcagaatctagaagctcagtgaagagggcctgttggactgagactggtatcagaggagtcaaagccagtggccagtgctcggctttcccaagtgcacaatggggcttcatctgagagtgtcacagaaagctagaaactgtgccaactgtcaatgtcagggcaatgggtctttaatagagtggcactgtcaggaacaagttaataggaaacagacacaaggatacaattctttctctctcctagtgtcctgaatcccagccccccatatcacaaagaagagcaggtttagagctgagagacaatagcttaataaggggcatataggcttaagagagctttcataaatggatcatcaacctcatctctaaaaaacagtgacctttccataaaagtgcatcctatgacattagaatgggattgggtcactttcttgatccaataatctgttgctaatacctagcattcacgccctaaccaccctgcatacattcttttccttggcctgtaccatctaaaatatttgcctgttgttccttgatctaaacatgcattcttgacctttttaacttaaaaccacaaagtatatcatcatttttcaccaaatacactgtaacatttttgtgtaggatgaattatctttgaaatatattgaaactctagccctctgcctagctttagggcttctttggctcattaccagatggacaggtggatggaaggagggagggggagatgcttatatgagtgggaggtatgaatatgtgtgtacaatgaggctgtgactgtaaagaaacacacagtgcagaactaggccagtaaacgtaaccaagaaacagagcttaagttagaacttactaaaggagttttccattttcttcttttttttgcattaatattgttggtcagatttgcagtgttatatgaaaatagtactatggcgtgtgaaccaatttactaaacaaatagcagctgtagtaaaacatctgtttgggaaagaggaaatataaactcataaaatcaaatgaaggcaatgtgatctgtactttcacaatatgagaaaactagacatatggagcagtttgcaaaagattatcaatcattctattaaaaaaaaacaaagtgtgaaacaggtaacattatgatcttcacacaacacattagccagtatctgagtaagattttagaaaagggtatgagaatgtctctcaggaatgagaatagcatcaacatctcccttacaaaaggaaatttttaaggtgtgaaagaggattatatctaaaaataactatatgtgtctatgtatactgtcaccaatagtaagatgattgttgtactataattatacaagattaaggtaataataacaaaaggaaagaaaaattttgtgtggaactcgggaaagacatttgctatattatgtatagatctgccatctagttcattagtgccaaaatgatttgctttctgaggatcaatcattagaggaactctaataaaaatttcaatgaaactatgaaagagaaaagtaaacgaaagactgggtttcatccttatgcacccaatctgcaagaaaagcaaaaatcaataaagagagcttaaattaaaaaaaaaaaaaagacccttctgaagaagctgttggctatcttttttaacaacaagaaagctgattttgtttgtttgcaatactttgctgcccctgctcgccttctctttgcttcacagagtttaagctaaaaccaaagaaagatgtaatacattcaaaaacaaaatcacatcactggcataaagcaaatcagagagcagtaataaatgtcagagctgtaacagcaaaggcagcagctaggttccttcactgcccacccccaaccccaaccaccacacacttaaaagtgaaatacctagctgttatcttggtgcctgcagagcctccccattgtagattcaataatacaagaggcttcttatcagcagctggggtgactgattggagctgtgatatgtttagacaatgcactgtatttaactgaatttacagatgccccaactcagacgtggtagtaaacgccagagactaataggaaattaaacatgtacaatggactaactccatttgctctcacacagtgtaatgtgtttagttaacttactcatagtcacactttatctttttctctatggattctctgggatatgtttcaaattggccagagattaaatcttcttttcaattttttgttaccattttattgccgctttcccttattattggccactctttctcttgcagagataagctaaacaagatgaccctcagcactccccccacaacccaattatcagatagtcagcaaggaacgcaagggtacagaagattccataatattaatattaatataacatgagaggaacaaaaatcagtcacttatttgaaagcaatggtgtatttagctcatttgaaatttaaatgtgaattttaatgtacctggtatgtaacacatacatacagaaagagacagtgtgggagcagcatacataggtcaggttgagaattattttaactcttcattgttcatatatttgctagcaaaaatggcttcaagtagacatgtgtctacataactgcacagcaccactgttgaggggtggaaaggaaaagattttcatctggttaacagagaaaggtaatttatcattagataaacccacagattgatctgtagatattctagggaatccttgaaagaggctgttcacagggaaccctcttgttatataatagcaattgaacccataatggttttgttgtccttaggaaactgtaaagaatttctacattcataaaatcatgttacctagaaagtataaaagaaatcttgtctattccaatgacattcagactcctgagagggttaaagacagttccagctgaatgctgaccacaatccctacacccccatgaccctggcctggagaaaagtggatggagttagatgtggaaaaaactggccaccaaaactgacaatagtacaggtttgaccatcatgacctctctgtcacttgtttacatttattatgtagacaagcaagaacactgcggcatcagcctaacttacaaaataaaagtaaatgagatcagggtgagcacaatggtcaggaaggctggacagagtgggcgcttgcacggcaatttacatgctttatatttgaaagaaagaaactgaatgaagagatgttacagcatcaactccgtgtgtgcatattcatgcctgtttctgaaacaccactccctagaccttactataaaatgactctaatctgatagaccagagcacccacgccagtaaccacaacctgaatattacatttccttctcctttattccctattttctcagtggctattttttactgagaccacaactattttattttcagaattttgcatctaaggagaggtacaaacaaaatagaaaggaaacatgtgactatgatgatcaaatgataagtgcctgaatatcataatccttgcaatcaattctttgcgtggcttttttaaaaagcaaggatgataacaaatgaaaacactgaaagcacatgtaatcacacaaaaccactaataagtttatataattaaacgtcccaaagcattatttctcctagatcacaattttactctgttgaaagaagagggtggcatgatatcaaggagtactaatgtcatttgaaaatcaagttataatcaaataaccattattcagtaaaatggacttcatagtaatcatttctttctataactgagcagtccaataaatgttacttctcttaatcagttctgattggtatttgctatatgagacacagacaaatctttgaccaatctttaattagtatcactgatgaaatatttattcttttaatttgaatttagaaacccaataaagccatgtttgcatcttttatcaacttaaatattatcctcctttattgcttttgtcatgactgtagattctgaagatgttctcctgaaacaatgcgtatttcatgtatgcatagttgccctggtctcattgcttttggggcaaatatttaatataggcattcaggtcatacattcatttcaatcttctttcttaggggatcataaagtaaatttcctctaagtgatgaaagaaaaggagggagatacttctagacatctaagaccttcttagggaatcactgattcaccaaatcataacctaatccttcctggagctcctggagttcaattcacagaaatgataggactggacaacattactgggcccttgtgcatggaatgtgtggatattctagagcccagacactgaactcagaagccagtgttccatttttggctctttactgatgagtagccgcctttaatttaatccaccttttcaaccggaggcactgttaaacagttccttaggtctgatggttcttggggatctaagctcatttaaaataggcagaaatcactaaccatattattaaaatctaatgaagcaatcagattgcatcttgttataaaaaccactttaccaattccctctagttcacaaaacacctctgaaattaatatatctagagtaatatagctaaaaaagaggaggaattgtgtcttctgaaagatgtacaaataaatgacatacatgtcttctttgtagcacagtggtctccagtacctatgagcatctttcttggctacaggctttgaattttctttcaccttctcttttgtactctacaatctccaatgaaaactaacacttggtaatgaatctgtcaaaaattagtacgttgtaatgtgtagaaccttagatgttcataccagctgtgcttgttaatctattacacacacttacgacatcatatacctctgctacataggatttcccacttacatttattctacatttattcatgaaattatttgattcctgtcagattcacacattagattataaccttttctagaatgtggcttttgtttatgattataacttgaagcctagcacaatacctggcatattaacattcatcaaatgaaaagaacacagaccatccctcaaagaagtcaacacttattctgtacttgtctcaggagagcctttgagtgggtcacacctttatctaccctggagaacacatttcattgttgccacggcttctgcagcagagccctgaaccccaggtgagtatagtccctggtactcctgtatttccacttctttctagaaataacagaagtaataactgaagtttcataattcaataatatccattttatgaaaaaatgaaaagtaggatccctaactacttaagtcagattcaataaaatggaatcctctgtgattcactaaataatcttagctaaaaacaactttagaaataactagtctatttttttcttaagataatctgccatgaaaaagacaggagacataagcataaaaatagcaaaattattgacgcattagttaacatagatgttgtatattctggcacttcctgtcaaaatcttcattaggggttaattctgtcaaacaaaatcttggcctacatttctatttggtggtagctgtcagcttgtattttgcacgtttcaatattatttaaaagtacttttccatatttaatatatgatggcttactgtacctttccactggcatttatcacctctcaagagtgatcagtctccacaaaagtgaagttcactgtcacagaagggcctagccctcatttatttccctatatggtatttggtacagaggcagagtgtaccatagcaggtgtgccttcaatttagtggtcatacatttagcaatagaaatatgagttattaaaataggcttgtcatctttaaaaaacattaggtgaccttaaagtgtggataattgtacaaaattcagtgctttttttttttttttgctccagttccaaaatgtttctaaagatgctgccattgcccaaaccagaattcccattgttggcaggataacgctgagctgagaaaaatataggcttacaatatgcccatcaaccagcttaatccctgcctaatttccccatatccttaataggctaagtccatgcagcttgcagggcttgaaggcatttgaagaatatttaaaggaacatttttttttccatttgacttagctttagcgtgataagaccatcttaaacagtctctgatcgttagtgtttgaggggaaggtgcactgcagtgtaggagaaacaagttgcctaaagcacttaatttgatattcctctcccctagctctgccacctactagctatgtgacttagggaaggataaccaaatacttcctcatctgtaaggatatgaggatagctaagtgctaccaagaaaaaaattgtgtgtgtgtgtgtgtataaataaatatatatgtatatgtacatgtgtgtattttatttattgataatgttgagcactaatcctgtgaaaaacattgtcttaagtgctttacatgtattaactcatttattccttagaacaaacctgtgagaaaaaaggaaaggaaacagtggttaagtaagtgcccaggtttacttaccttaaaatggtagaggcagaactggaatctagctattgtactgcctctgagaggagtaactaacattgcaagaagcatctcagttgggaggccgaggtgggaggatcacttgaggtcaggagttcgagactagcctgaccaacatgatgaaactccgtctctgctaaaaatacaaaaattagctgggcgtagtggcaggtgcctgtaatcccagctactcgggaggctgaggcaggagagtctcttgaacccgggaggtggaggttgcagtgagccgagatcatgccaatgcactctagcctgggcaataagagccaaaagtgaaactccgtcctcaaaaaaaaaaaaaaaaaaaaaaaaaatcatctcagacacagtttggcacacggcaggtatttgatataagtggtaagttctctccatttgtctgtttcttgtgttttcttttcatataaatcaataatcagattctcctagagtagcctgaagacctaattccattggtataccagatcttagcagggagtcattagatacaaaatcttataaaggtgtgtataaatgtgaagtctacttaatgtaacacacatataaacacactcatgcactcatgtgtgcactcagacacacataggaaattcaaataagccttcaaagaaagtctcctggaatatctgctgccaatgagtttatcatcagtattgacggaacatgaactcaggtcacaaaactatgggttttggtcacaaaactgggtttagaggcagtgagaggaggaggtgagacaagaataaaacttattgcctgccctcaagggcccagaatctaccgggggactctaataactcactgtcatatattttgtactgtgctagaggtatgtaaaaaaaaaaaaattcctatgggaatataggacaagaaacaattcttcctgaggattcacaaaatagaagtgctttcttttggatatgttgaatttctccaggcaaagatgagggtgagaagagcattccaggttgagagaatgaagaagcagaaatatggaggcatgaaaagcatgctatgagcaggcaagtggctgaaacatctggtgcctaaagaaggctagggagagaacattttaagttccaattgtgaatggctgcttatataactactagagagtttggactttttcctatgcagtaaaaaagacaggtcaggcacaagtcaccaaagatatatagactagtggagattatttcagtaacccaggtgagaaagggaaattatctatactaaagtagcgggaaaggggatgaacagaaagagatggattcaaaagatactctgtaggtagaacctactaggcttagtaactgaagagatgtagggagaaggaaaaggatgaattccaggatgtgtctaatggtagcaatctgtatatttaataatcctaacatttactgttgcccaaccaggaaggaagacaagggaggaaggagggaaggaaggaaggggcgggaatagaactgtttcaatcctcaggtgtcatgaaatttaagtagattagctgatatcttgggttacagagaagtcatccaaagaaacttgttggcactcttttatcacttcccaaaatgtatgcataacattctttacagttccttcctctccacccccctcctttcttgtttccctccccacttctctggtctgtgctagcccaaacacatcagcagagcttagccccacaaggcaggaagaatccatataatctgctttcccatttcactcatagtaacatcagtgtcgcaaccacagtttactttacactcctcaaaatcccacaataaaaactcaggttcttccaaaactgctttgtgggacttatttaacctaaaagctcagtgatgtttacctgtgagcctgcagcagcgcagtggaataacttaataaatggaagtggcagagacacctttatgtttcctatgcaaatactgcttacaaaagccattaatgggaattatggaaggggaaagccaactaaatacatgggccagaataagcaggatgattcaactggtcttcaggggccttctcctctgctggtaattttattagaaccattaccagtgaagaaattttcagcttttcgaattgaactgtaaattgtttctgctttccatagtatcttaaagggatttcagggggaatttttgtttggtttgtggagtgatcagactaggggaagttttttggaaatttctgggttactgttgggaatttttccagaaatggattcttcttctttggaagtcttttggtcattagtttaaatactatattggaaaatttctacataaagatttgtaatgtgcccccaattttctgtttataggatttataagaatattattgtaatggtaacatcttgtaatggtgacaatatttctattaattttatgaaaccctataccactgctttaatctctgcagtaagaagtcattattttttaaagcgccaaacacagaatgtgtttattacaattcttcatgacccaaattatttttggcagaggtgctataagtttttccctctttatttataaaaatacattatctgtaattctgggaaattgaccacaaaatgacgtggaaagcaccttaaaatctttacgtatgagaccacgtaaagcctcataataactactgtgatataacattgttgtgttcaaccattacatcatttgttttactcaaaagtgtgtgcctctctacgtataccaattttaacaacgttgtattttactgttcacatcctgcttagaaaacttcaggttacattaataatgctgaccattcacagtggcaacataaaaattcctttatcattcttctttttcttctcttgaagccaacgttcgaaaactaacaatggaaaatatatttgaaagatgatggatatgaataggagaactagttttagttttctggaataatatcttatgcacaaagcttttatcttattgttaacctttaacacaaatagatttccttctgccattttccccgctttgtcctaagtttcatgggagagtctttgcttgatttgcaactttggtgtcttcgtagggccacattgtccaagctgcactaaattgtaagtcccttctccctgacttccacaccctgctttacaaaaacacaccattttgcagatcaaagagagacgatttatgctttcatctagctgacggacgattaaattaaaacagatcagcagtgcagtgcatgggcaggtggctcccaccaccactctcggcctcagagcgattaaattgtggcggagatggagggccttccgctcccattcccgcacttacagatcaaacggtgacaaatgagatgttactgctcttgtaaagcaaggctacaatctgtcaaaatccaacataatttgtgaccctctgtgacatcctctttctcttttttttttgacatttgaatacagtgattgtactagagtcaagtccatttaagtgaatatagtcaattctatctaaaggaatacagcctgttagctccaacatggtagctgaatatatatctggtgagtactccagcgaccctttgtgttaagtgcataccattaacaatgaattctgattttttccaagttatataatttgatatcttgacagcccagacacttaaagcactactatttgttttaaatggctttattttattgtttaaatgtcagtatcaaaataaagtaatgcatacagtcttgtcagttctagtgcagggggaagtgttcctgttgagaagagtcttgaaagagttggttctaaaaatggactcaaaagtcaattgcaatgtctcttggctaaatccttaaatgactcatgaaacatatttataccgcattttctgtttagctggtgcatttaataaggaaccaaagcataaacagcgaagggagcacagcatcttaacttactgaagttgacattattgccaggctttaaaaaatactgactatgggaaataatggagaaatgcacaatagaacccaaggcccagataaatgagcagacctctatgtgtgttgtaattatataatctgctaggttattctaggcggcttggtcataaggagtaaaatgaaaaattcaagagactgattgaagatagtttctagtatttttaactactagaatggcagggagagttgattctcttatgcctccactctattcagacctgtctgggggtgatgagcctgtcacatttcagaacaggcattgacttcctacttcaaagtgactgaggagctttttcaaaagacttttgttgaccacaaacctttaggcaggttaacaccaaccttcagggaaatcactctgaaataactttgcttacaaagaacaaaaatatatctagactctttgagcacttctttcctaaagaaatcgggttatactttcaagttctttggcatatttttctactacggagctcattctgtaggttagtctactcaccctggtctatttccttaacgtagggcttgtttacacatgttttaaggtagctttcctgcatgacgtacaatctctgttaataactttgcatcagaagcccagctagctacagggaagaccccagttcttggcatttcagagtggtcagctggtactgaaaagtcaactctgtgtttggtatatggcattgtgagaaacattaatctccccctaccatcatagacctttttatcctctccaggctttaatgctgtcctcactctagtgttacccatatgtggaaagaagaaatactgtccataagaccagcagaccttgcctatttctctctcttttttttttttttttcctgagatggagtctcactctgtcgcccaggctcaagagattctcctgactcagcctcctgagtaggagggattacaggcacccacaccacacccagctaattttgtatttttagtagagacagggtttctccatatgggtcaggctggtctcagactcccgacctcaggagatctgcccgcctcggcctcccaaagtgctgggattacaggcgtgagcaccaggcccagccaaccttgcctatttctaggcaaggtctccacctcagcctgatcacattgtgggtgtcagtcatttgctttctatagccaggataaagcatctcaccccatataagaaggctccaggtcctaagcccaatgtgttgggattatactagggtcgctgtggtggatgatcacagaagagggtccactggatcctggctgtcactactgtgtgcccacagagacttggaaagtaactacctcaaagctacccaaacccgtgggtgcaggtggcttttgttaacagtgaaagcctaccaggagattggtagtaaattcaagatacatgctctactctgaaccatttgggggaatgggcgcagtgacatagaaaaacgcagctttagctaatgtcctcttcacaattatctttctcaaatcaaaaagtgccagactaaaaaacaagcgtgtctgattaaaaaaattttagaaaggttgatttgtttccctctttctctcatcgatttctctacattttgtttataaatgcaaatgtgttaggattgtgtgttgatctgtacctactgtgatgacagagggcagtcattcaggcttgccaactggctgcatttgtgaacagattacatcctttactttttgtgagttctgtctggctcctgtttctgtaaaggcctttgctgattttataggccgccacaaaccactgagctgatctcactttcctccctcttctctctattatctctaaaagcacttcctgcttttgatgtagattctccattagacacaggagatacagggcaggttttcacctttgcctgtaagcacaacgggaggaaagagtagggtggcagaaatattattaactttaaaatcttccttctacctccaagatgagaataaatgtcccccaaagattccctgagatatgcatagacagctaatcccccataggaatctcctgtcacctcagggttttttcttcttttaatggaatagaagactcagtgtatgtagagatcttttcaaatgaaactactgtactgcatctgtcagatgacattttcataatataaaactcatccaatctgtttcttttcaacattttcaatgtttgttatatgatgtcaattatagcttaacttcctttaccctaacgatttcccagagttttattagattggccagctaaaactcacatattcccatttaacttctcaagcaacagaacagaaggcatgagtggctgatgttaaccaaaccaaacgccacttgagaatgccattaaaagaatcgtggctgaaggttataaataggtgacactatttataaagcataaacaaaatgtttcttgatgtgtaacataaagcccaagcagtcctattgttaaaaacctgctcctgtgcctaatgtctacataaatagcagcagcaacgcagtatcatgagctgctttgtttggcctcaagcaaatcataggcatattagatgtaacatttcctactaattgctgcttggcctttagaaaaaaaaaaaaaagttgaggatggggacttacgatgtgaggaaatgtagtatcatacagcagagttcaaaggaatctaaattatttgaacattctgcaatgatcatatattgtggtacttaagtccaacaatagcatgttgataacagaaatgctaatctcttggccttaaccccacccagcacttgttgctcctgaaagattaatgttatctctctatttaagtaacccacatatatgtccaaaattagactgtaaagcaagagcctgcttgactagaataaaatgttttttaacatcaatttataaatactctgaaaatgcaagtcactttccctcagctgaatggctaatgctttacaagattttgtgatacccaaaccattggatgtcagaaagatttaagttcaaatcaacatgcatttattctatggtacagcaatatggaaggttgatggcatgaatattttacggtaatgcttcaatattaaaatccccatattgagattctagagtaacatacaaattatatttaaccatcaaaaaattcattgaagtacttattagagtatcagtaataatagtcattaaaattttatgatcacttaaaagaacactgaataaagacagtttagcaaatgccctatttacatattttaacaagactcacatagtaatatcaaaatcacacattgaatttgagagtaaaattacacttgccctcaaaagaacagatatattatggatataccctgatagatttgcgtgttttcccaatagtggggcgagttgcactgattcattcacactgcctttttggaccagctgcaacattataaacattatacaagatctgactaagaatcaggggttcaatctatgaataaagaacagaattaactaggtaggttatacaggaattgaatctgccaccttagcctcatttggtaccatgtcctattttgttcagctacaatcttacatattcatctacctaatttacatatatataaataagtaatatgtatataacgattcagacatccgtatgtatacattatgtggcttactttcattttcaatatttgacagtatttatgcaagtggtagcccttaacaattttgatatttagcatcttagttgattttcactgcatcttagaatgctaaagaaaataattttcgaaattttcctaatccaggggagagcataaacctcaaaaaaaatggtgtgatttgttttctttgccttctatgtttaaggttaggagtgatcactgtaaattcaatgaacttgagtgaacagtaggtcactgaaattctcaaagagagatatatgtaggcactcagagaagatgggtggcctggggtcaacgaccaagcctactgagaacagcccatgccattgacacaggtcactgtggtttccttggcacgtgtgatttactggcaaatacatccactagaaccctgtaggctttgtcagaatttgagtctcatgagtggcaaattaatttggcgaggcattcagctccaccagatcccatgatgaatacaaaagtcacaccaacatatgcattcttagctcttttccttgtttaatgcatttacaactacatctaatgttatgaaatcagagaagggaaagacttcctaatattgcacagttctggtggttggaatgtgtatgtgtgtccatgcttaagcacatgtgtgcatgctcacatgtgtggaagagggaacattaatgattcctataatcagaaatttatttaaaaatattaaatacaaaacaaaatgtcaaatgatgtttccagaagtctatctaaataggcaaagaaaagacatcattggaaatattgggggccaccttcattctattgtggatcaccaattcatcaaacagcccattatcttcatggttcctgcttcctctcttcaaagaaatgggaagtaagatctcttaccttcattggctttcaaatatgtaggcttgagcaacaattcatatggcagccgtaagagctttccaggaagggcagtatttttttctcttcgaaacggtatctaatactaagctacaaatattgttatgttctgaaatatatgcaacagtgacaggagacaaaagaccacaagtaatatatgggtccttttcctgaagcctgcttaccttcccaaccataatttttgaggttaacattaaaatccaattgtatttttcacaacatagaatggtttgtttagttgaagacttaacagatgcctaaggaattgacttgataactgaataatccacggagtacacccaatgcatgtggccaggagagtcaagctgaactacaaatatctagtcagtaaaatgccttaaaatgttttcaaactaatatgcctattcaatgtgaattagaaaagctctaagtaggcaacaccgagtcaagaagattgaaagcacacactttctctgtctatgatctttctcgaaatttcaacaagtcaaacataatcctgttattaggtactaaaaatctacataaatacatgtagagaaaaatttttcctataacttaggagccttccacactctaatagcaaagaatatagtgtagtttttttaagtccaggctcagaagccaatttctgggtttcaatccctactgtgtaacttaccagctatgtgattctgatcaaattatctaatatctcagttccccaattttctcatccacaaaatgggttaaaaatcgtatctaattcatagcattgttttgaggatgaaatgatttaatacgtgtaaagcatttagaacatgtggtcagccctaattgtaaaccatcagtattatctaatatattttagacccgtccaccaccacaggaccaacttgctagtttaactgttacactgccctcagagaatcctatttatctacttaatttttcatccactcatttattccattgttcattttctcaaaaacagtttggagaaggatataccacttaaggactggcaaacctataaaaagaattaatgaggcctaattgtgacaataagcatgcactttggtgagctggagtcattgactaatataagccaatcctcccttcacctctaattcattcacattgcattgtggtaacaaaatgaataaggggtttagtcatttatatgtgacccaggacgatgcttaagacatattttatttgacctagagaaaaaatatgtaagtatttagaagaaggtgcattgctgataggtggcaatatacccttatccactgtcctttgaactgtgtctatagttaccatttggaacatctctgctacttaaatattctctgttttaagaaaatagttcaaggcaaagcagtattttgaatgatatagaaaaaggaattaatctctagatatgtttggcttaccaatctgaaatctgctatcccttgagataatatcaatattgacatcatgtttggacaccagacgtcaagatgcagggtgttttccaatgaagattcccatcccattttgcttttacaacatccaatgaatatggataagatcctagaagcagccccagatatgtatccacagtagaagcttaatgtaagtggcaaataagtgatatttatgtataaaattttgcttacttattctaggctaacacattcaaagtactaaccttgacctaccctatcgaaatgggcaaaaattcagtttattatccaatttaaacatttttttcttcatgttttattggaaaattatgcctgtctagttcatggcactactaaaagaaccatcccagtgatctgtgcttaaaagaattttgacaaagatgtgcaatatcaagagccacacagagtaattatttttgtcagttccatacattgaatcaaaagatgactgttggttgcagcccatttgttgctaggtaaggaaaaaggagatggagaaagatcttagcccacatgtgttgggtatgtgatggtaaagccacgccccttagaagaaaggattccttctgatactcctcatctctagtcaacatctcaagttgtccatagtcccatttctacattgtcatcttgaggaaactgaatgccccatgactgatcaggccatctggggcaggccatcaaccactgaagacaaaattttactctccaaagtcatcttggctttgctgttcagaactgcagactgatggcatatggggattagtctattgcaacagatggctccactgattttcctcatgaagtgattattgctccttccaacaatattcccaaatccagtcaggcactgggtcaggttaattctgccttaggaatgtttctcaagtccatctttccctttctaggcccactgccaccaatctgatgagggccctcattgtttgacactttgtgtatctgcagtgatgtgcttactagactgcgcctatcctctcctttctgccatcacagacgtgcacttgtgacttccctgcacaaaggcctgagctggatgactactgtctacaaactacagagtgaatagttggcatggaattcaagcaacaccttccatcagctggatcgtatctacttctctatccttagctccaaattctgccttttacaaaaacttgactctagccaaaatgatacttactatatcaggaaaacaccatgaaagttatccttctgaggcttcatttgaccacaatgacctcaatggagaaagtcctttgtcttgacctctgcagttctaagaactaacatttatttaagaacagtagaaatttcacttccaaaggactgcttaaaacactctggtcatcttaaatcagttcaggaaccgaaccctgatggctggtgcctgccattttaaatggaaactcatctctgctttcttgaattattagttttcttttaggcattctctgatccttctcaactgaaccttcagccctttaggaatacagactccatacttgaaattccctcacatgttagaatggcctacacgttgtaaaaattttgtttactatgatattaagagaaaggtatgtttcttctttttattaagtagctccaatggaaaacaaatgaaaattacacacacgcacacacacacacacacgcttcccataagatagtgcatctaattatttcattggtagggcatgccttttatcagtgttctgcttcttgtaaactcagtttataagctcagaattttcctgaagaagaaatttagatgcgtatcaaccactctggttacacatttctttatcaaaatactctacattaatttgagcatatgaagcctgaaaataaattactagtatattttgaaaggaatctctctatttttagatgggattagcatttattagagatatggaaataaaggaaaaagggagatacaaccatgtgaagtaagctaaacagttcttatagaagatatcatcatgtttaaaatattcatccttttttcctctggaagtacaaaatatttacttctgtagttacagttcaatgcaacttatgactaaaactgtcatcagctgaaatcattaaactttttttttttttttttttttttgagatggagtctcgctctgtcacccaggctggagtgcagtgccgcgatctcggctcactgcaagctctgcctcctgggttcacgccattctcctgcctcagcctcccgagttgctgggactacaggggcccaccaccacgcccggctaatttttgtatttttagtagagacggggtttcaccatgttagccaggatggtctcgatctcctgacctaaactctaacttttaagaacaaatatgatacatagaacagggaagatactgcttgcagcattatatagattagcatcacccatataggttataccatttttatcgcactaaattcctgcatcctgtaaataacacacccacatgtggagaccagaacataccaacataaaatattccctgcccctgttcttctggcaaagagaaaaggtaccagtgacaaaactatactattgagggaccaaggaaattgaagagttactttatcaacttctgagggtgtaaggaaacataaaacaaagctagccaaatgcttacaaatactgataagaataactagaccatgtagcactgaaaacttacccaatgtcacgttaaataccgacctttctaggagacataacctctaaatggtgttaaagttaataataactaaatatgaaaaatatactgaggatttgctagagttgtatacaggctggaatgggcatgaaaggaaaatgcccatgtgtgtgcatacatagcaaaatgcccagaaacacaaacaaatatagaacaaagacaggtctacaccgagagcagatattgattgcactcaagggcatatattcaggtggtccaaatgtactacaccagtgggatcattatttatgactcaaactctactagccaagtccatacctaagaccaataatgtttggaaaagatctggaacactctcttttcctctaagatacactaagccaatatggttcccactaacacctagaaaaatacccagggaggcacaaaaaacccatgagcaatcaacaaaggccggccttggtctctttctccctaagccataggcaggagagtgttagagctctaaaaggccaaagaggaataaattcctagaacatgaatagaaacatgtctttgctcatttccagcaatactgtgagtttctgttactgtgttcaattatcattgcaaagatgaaaaagcattcagatacttaacggtgtctaataatagtagacagtttaggacagaaataattccagccctctaagaaacctgtcaaaatatcccagaggtaagaaacaatgaccctacagtagactgtggccatgaccctcaggtccaagtgctaactctaaaaaagtgtcatgagatatttgatgacagctgatcaagacatcatttttacgccctacctggaacagataatatcttttgaaatgaatattcagcatacctgccttcaataccacatggaaaatcacacagagacaaagggaaaaaaactgccattctttctcagtttaggctattcgtgagctaatacataaccgaaccttcatctttatgcctctgttctcaggttaatatctccatccctgaaagtctcacccaaattcaagcttcaaatttttaactgcttctaagtcattttgatttggacaccccattattacctaaaacccagcataccttaactaaactcatgatgaatataagttcagtacttatcagagggcttataagaaacagagaaagtactctaaatattaattaagtaaattactatttcttctcatccgagtttctactctcaatttcctcaattctgttacttggcttctggtaccctactttgtttctctgaaataattgagttgtcttacgttgttcccctcattgaaccttcattcaaaatgctcaccaaatatctcaattctttcataacagactctgtcagatttaactctgaatgctaccaccctcagacagtgatcatcttatacgtgggccaatgaaactgtctcctcttttagcccaattatgaactgtctctttcccctttcatctaattctactatttctacaggattagtattcatgaaataataacaataataatagctttgttcctttctcagaaacacgtactggctcaaaactgttgttatattaactcttaactaccacatctattctaatgtttctctaaactgggtccaccctgcttatcaatccttatcacctaccaaatgtcccaatagtaccatttgatcatttttgtcctcactttacttatgaaaactctttactgatgctcatttggcaaaaaaaaaaaaaaaaatctatattaacacttgttctccatatgaagttgatccttataataacgtcttgcttttcctattttcacctggaaacatcatgcttccctacacaaacactaaattccaggtgtctagagatgataacataggaagcaatatattgtagtaattaagattcaaactctggagtagactgctcaactccaaattccatctccagcacttaaaagttatatgagctcaggcaagccttttaacttctgtgtcttcgtgtccatcattatctgtaagatggggataataatatctatttcatacagttgttataagaatcaaatgagcttctacatacatatacagtgcttagaggtggacatggcattttactcactcaattattttcagtaattatgtatttcttttagccactatccactgtttctttctgtgtctttctgtgttcctatatctctccctgtcttactgtctctatctttgtctccgtatgcctttctctctctgactcctctctcactccctctgtctgtttttcttccccttcacaatccagttggaggaaagagttgttcattctcattacttctacttcatgacatcccatgcattcctcaaagcacctgatttctgcccacaccattctaatgaaaccattcttgccaaaatcagctttgacctctttgttggcaatcccagtgatattttcagttttccttattgacaattctgcagtgcttcacatttctttttactacttcttccttaaatctccattcttgagtttctgcaataccacgttctcttgggttttcttcctacaactccaatcttcatctcctttaaattcctcttctcctaccctcggcttattatcagcaaacccaggattctgtcctgaactcacttcccatcttgtgttttaaagcatttttcccatgacttctatctttcattcccatccaaacactgacagcttccacagtttcatctgcagtccagatctcttctagcacaccatcctgcctactggatactgtggctccactatcgcacttccaactcagtacttcaaaagctatatgcataccttctcccctttcactccccaaatcccattcatcttgggtgccctggggcagtgaaatgcagcaccattgacagtcagagatgcctgtccctgtcctagtccagcaaccctcccgccacatttggtgcattcctctgtcttactacctccccactctgttcacttctttcaaggcaggactaatattttatttcagtctgtcgttgtttctaccctagattattgcaggaggttcctcgctggtatctttgtaactggccttgcccgctgccttatcccttggccacactgcagtctgactcattgttctaaaaatgagagagtcagggcatagatagccaaatagattagaatcaaaagtaacagcactgtaagttattccatggagctaaggtttatttttctctatctttgtgcccagggctctgccagaacctaaaagacctaaagtataagataagcagtatttctggaatttgtgaccactaaagtctattaaacggcaaggaaatcctccaaagcagattttctaacccattttcaagggacttgtttccagaactggaagaaatgttacatatggttatgatggcatgatttgatacggagagccttgttctttgtagaaatcaataataaacatctcgaatccagataggaataactagtttgtagctacaaattttaagattgtatctgtaaacttggaaacctcttaattcataggtgccattttttaaaatgtataaatttcctggtcactcaatcctttctcttttaccaggtccctctgcctctacctcccatgcaccccattcctgaattcccctccttttctttttggtcacattgtatctggtttttactctctgagatgccagctcggcttcctcaacacatctcagtcctgtttagttctatttccactctgctccatctagtggaatgctgatttttacagtatggtgccagctttgcttactctactttgctgcgcagggtcaagatataaacattgaaacaaaaccaaactttaacctttgatagataagttaagtatcatttcccaaatacctggacagaaaccagaattccacgagcatgcttatgtgaagaaagtggaaacatgttcaatccaatggcagcattaggctcaaaaacggctactccatcaagaaataaaaggcaaatgattattttctctgttatttaagctttgttagcatagtcttcttaatgtaaattatttgataattgtgaaatatgctccagggaccattaagaagtttattttttttttcttgtactgaatgacaaaagttaaactattaggagaatgaaagtattcctatgcttgtttttgtatttacagtatgcaaggtatacttggaaccatgtgaaaattaatttcatcacaaaggcatgggtatgattctctggaaaacatatattcctctatctagacagttattttacaatattcatgcgtatgaactacacaatcaacttagagcttgatggtgtactttcttcagatgtatcctgatgaatctaagtatgatatcttcatgattagaataatggatttttaggtctagaaagtatcttagagtctagagccacaaatattaattcatgtcctttctatacttccagtgtacactcaatgaatacaaataactctgttgaacctgataggatccaatctttatttatttatttgttcatccattcattcactttagagacagggtcccactctattacccaggctggagtgcaatggcacaattacagctcactgcagacttgcactcctgggctcaagcaaacctcctttctcagcctcctgactagctgggtttagaggtgcgatctactgtgcttggccaaggatcaaatcctaaagactcaagctaacagccaatttggagtagattcccttatgattttacttctggagttgagaaatatgtgaataaacatggggccaattattatcatcaaatgaataaaaagtcttatttttaaatttgattggggacagaaagatcatagaaatcaactaggaaggaaagaaataaaattcattctgaaaatgacaacaagtctaggcataccctaccctgatgccaacaccattggctcattcattcattccctgaagttgtagccatagtgttcctactaaaacataaatctaatatgatcccaaacaagaaaaagcaaaaccttcaaaacttctcattaacctcaggcaaagtccaaaacccttaaattgatttcaagatccttcattatcaagtccctgactccatcttcatcactagtaacctgcttcttcacatcatccatgaccctttggccatttgtaacaactctcatttcctcgaaggagcaaaactctctctcagcctctgagcttgtgcaatgactgacctctccacttggaatatctgctctctttccctccacccttcacgagttaatgtctgctcattcttcaggtctcactttgcacatcacaagactaggacagatgcccttcctttgtgctcccatgccactttgtcctataccccacagccagttatatggcaaactcttcaaactcctgttcacctagaactctccatcacctagattaccacttggaacaagagatggtcaatatatctttgctaaataagtcaatgtataaaggaaggaatgaaaccaagacatgagagaaacatcagcacataaaccaataagctgacagtggaaaatttcagggttgttttattaaagacaaaagtgggaaggaaagatttttttttcttaagcataaagtataaaagccacataattttgcccattgggtttatatggatataagacaccaccctgagaagcaaatttaagacatagttagcaagtcaagtcagaatggaatacctatgaaaaataagtaaaatttccctattggacttattaactccaatatctaagtcactccctggggagaatttggctcttatataggaatgctaactttttttcaccagagcagactctaatcaagtgtgtagatgctgcaatacaccaaatggcagaggagaattaatgttcctcttgtgggttcctgaagtgtcttaccaccaggaagtaacttgcgcactgaatagaacagggatcattagaaacagttatgcaaaacttaagaacagaaatacccttgctttatgtgaaggttagaatttgatgattttgttttggtgtccttggggtggagacttaggcaaaataccaaatcatacccacagtcacagagctcaaattaagaggggggaaatgccagtttacaattcctctcatctattgttggcttcaaacactgttagaataatgttcccaagttaattctttgcttgtaaaaattttaaaagaaaaagggccacatatacacagtaatttttgaggccaactccctctccacaaattacccacgaaaatgaaaacttttgacaccaccattttaagtaaaaccctggtgaagtcactgaaaacattggggaagtaacttgacttttaggcacatgttgctttccttatcacgaagtcaggattagatgacaaataaatactaggggaagtgctatgaaaaactatttgcttcatgacagcaacatttatgaattttcgtttgttactttcattctcattttgtttcattcattctctggtcagagagacttcagtgctctaaatcacaatcatagactatcagcctgaattatttttcccttcaacacagaatgatgactgaattacagttagactttggaagtcatgtctacctgctcatcaaactccattttgacaatttttaaaattgttagtaagactaacacatgtgcatgcacatgtgcgtgtgaacacacacacacacacacacacacacacacaattaaatcttataggaaaaggcgtctacctctgccaaatttcagctgggaacaaatttttatggttagctaataaacctgctgaaaacaggggttgataatggaaaccctcccgagcccttaactatagtgtgcacagctataataaaaagaattaatgcagtcaatttgtactactgttctctgaacaaaaaaccctatttcaaccacagtcttttcaacagctgattggcagccctgtccatttcccctctgcagtgttgtcaggagtcttcaacatgataatgagcctgtcaccatattcaaatagccctgtgacagcatgttttgtgagtgtgacgtccactgcaaagggtctgtcaaaaagcacctttcagaaaatgaaaagagaatgctgtcctgatgataaacctaatttctccatagataaaagagtgagatttttcatcagattttgtcagtgttgtgttgcatttatctcttcaaatgttcctgttttctttttttaaatatacataaatttagatttgtcagtgacggggaaaaatgatgatgaaacacattttctgttctaggaagctgagtccatcaggttaaacagagggaaaagaaaaaaaaaaaaaatcctgatacttttctatcacattaaaaacgggcagaaaagtagaaggctaacttgttaactcctcacctgataaactttcaaggatggaactcagattctgtatgcatcactcataaggccaattgcatccccaaaaatagtcacaggaagttgctacgttcaaactgtgtatgtatacagtcactttctcagtgcacatgaaaatctgtaaccatgttagtagcaaggagaaagctcatccttcaagattcatgggctacttattatcttggtaaatagtgtttgttttaggaatacttggaaaatgcatttacatcatatttcaatggattaaagatttttgtgtgtgactaagatgtttagaagtactattgtcaagggaaaaataattattcttgtgttatgaagacttataaacagcccaggctctctaaacatcatttaattttcttcctttggtccctctccaatgtagaccaaatctcagtgtgttcagtgttaatgcaaaaaacctaatttaggtctttcctcaaaagggatatatgtacgtatataagtatatatacgatatataaaatacataccacacatacctatattatatatgtatatgaaatatacattcatacataggtacaaatacaggtacacacacatacacacatagtagaaataatacaactgtctattctttgtgaatactagtgtctcagaatttgatgaaattcacatgcatgggcccaaggaaaactgagaagctctctggctttgacagtggaagaggtgggacaaggattgggatgaggaagcagggggacaggaagccagcaagaactgtcactctctccctcctgaggtgccctccgtaccataagcaaataaacacatacaggaggtcccgaaggcttctaagaaagaaaacatggtagacatgtaaatctaatgcctactttatctaaaactctatgacaataaaagaatcttatattttagaaaacacatactctatccagtgtactactatgtcatttaattcaccaatatgcctatattaaactatatatcaaaacacttttttaaagatattaccaaacatacataaccttgtgtctccctaccctgactttagctaatggctcactgacttaagtctcattttcaaagcaatattttctttcactcatctgttctatgcaacttatgtatctataggtgatgatagcatttgtgaaaactttttgctattcataagcaagaaaacaaccgtaattttcattcttccaatttcaagtaaaataaacacaatcctagttatatctcatttgagttgaagtctgactaagccaaaaggacttattaattaaagaaaatgataatttcatgtttttgtatgtatcatagatacaaagctgacatgactagaatgttttcttaactaaaaattaatatattttggtggttgaggagggggatctcaatttttgcaatagagattatcctgggtataccaggaaggattaaaatttaaaacacaaaatagagatttttgtaaaggtatgatttacctgtactagtcaacagttagtgaagctaaaattattgaagagtttttaggtttttttatttttttttaattccagagtaagaaaaggcatcaaagaaaaaaaagtggggaggttccccaatatgtataaagtcaatgcccgaaagaaagtaactcattgagaatcagcaataaatttgactgattttaagtttgtcagctggagggaattattataaagtcaataaatagagctatagacagctggctttgtataatatccttttcctttgcctaaatgtttaaactattggttcatttgggattttcttttttaagaggaagagagagagagagggagatctcaaattgagctatcctcaacatacaaagcaaattccagaatcttgaagactttcattgtctctgaaagtcattgtcaccaccctaatcccctcattaaagctaaagaaatgctgggatggcattaaaatgaatgcaaaccatttgcagcaatctcctgctcacaccacctccaaatgaaggcaggcacattgcataatccaggcagcaagagctcctgacaggtggatgatttatgctcatagtcagaagaatcggagggcctgcggaggagacagcatgagcaaggtggtggcgagacagatgctctcagtgggcttgcaggggctggcaggctccaactagttcaggtgcaacctggacactttcagtgctgaactcctattgcctagattccaatactctgatgtgtcatttgcaatattatatgcaatgtacacaatgaataaactgtcaaatccgagcaagcattgtacatatgctgcatatacctcttacatacatagatattatgtacacaatgccccagcacataagtgaaaggaaacctctttttgtcaaatgatgattatgatacagatgtaaatattctataccttcaggatcctcagttctgaaaatatttagcccaggtatggtgagtggagagtgacaagatttcctaacaattggatcaatattaaagattgcacagtgggattaggagaaacacacctcaccagaaaactgacattcctgtcaattattttaattatttttcagatacatgacatgctttcatgacattttattctgagaaagcatttgaatatttcagaagaaaattattaagagatggataaaaggaagaatccctacagagttgaactgctttgagatcaatcttcaaaatagttttccagaatttctctcaatagctctaaacaataacaatttggtaaagattatggtattggttaaaagggtagataaacctaattacagttattgatgacaaattactgcaactccaatctctaacagaaggtattagccagcattttactggtcagcagtaaaccaccaatggacaaagaaattcacctcatagatctacatagaactatactgatcattccttttccacgctcagcccagtatctctgaagcataatgcttcaggtatcagtgacagggataagcttccaaatgtacaagcttcgggttatcttggatgaatgtgattttactttcaactcttagatactgtagggtcaaaggtagaattgccaatgagaattaaagatccctttaattagataacagtattcaaagacttgtaaattcccaagaagccactttgcaaagcaagagttacagtgttctcctgggggaaaagatgggcagtgggcttttatttttttttttctcagctattcaccactatgagagaatttttgaaaagaacaaaatggaatacattgtaagtaattcagaatgcctccagactttacaattctccctagagaaaaaactcaaacaatttgaagtcttcacaaactgcatccaaatcctttttctaacttcattaagctccagtacttaaaaatcgttcatagcaagtactttaattagagacgagccagtgcagaatagctggacaggcagtgcgtccacccagcgagcagactgcccaggggggacagtctccacctcactgatgcaactggtgaagggacagacaggggcgtggatacatttcttccttccccaaaacaaaatgggaggatgcgtgtgggttggtgggttacagagaaagattcaaacatcattctggcctgatcagtattctggcagtttaccattatacatacagaaaaagaacagaaagtgtgttaaagaatccaagttttaaggggaacagaaaacaaagtcatctgcactatggaagcctatttttttctttctttgtttcccctcctttttctctctcctccctccttttttctttgctctctctctctctactctctctctctccaccaagcctccttccaaaccccatattttgagactgaaaccatgaaaccattgccatgagaactgtagtacaggcacaaaaccagcatcaaaggatataagtgccacacagaatcctgatatgctgccattaatttgatgttcaggggtcaatacaagggtggaaaggtagcaggggaaggagaaagagcagagaagagagggaaacaattgctatgcatgaacaatttgtacttgctacttctctggctagagtaatgcctttgaggcagaacttgagcaggcaagtaaagagctcacaggttctaagctacccgcagctttgaacccaagttgtttagagacttaaaaacaacaactatagcaaatggtttttaagggacaatatggttgttaaatattctaggtggtgatagaagtgctttcttcacctataatataccttttttgtcctgaaatgctagaactgaatgaacagattagcatgtgcaaaagtaactgtagatgccttcataaattactcctgagaaaaagttagcaatgtccggatgagaagtgattccatggattcaaggtcatttgtttctggtccatgacagactttcttgctgtctcctcacaatccactgaggggtctctgtaattctggcaggttttgctgaccctgcctgtcaccttcagctctcctgcacacaggaaagggtcttgggccagagtcacacagagcattatcggggacctctgaccccagcgagacatggacagcgagcaatgtgaagacaacctaagcctgctgtgaacatagcacttggtcattttggagggaaaaaaattccagcaagatgacatttgagaccaagcagaaccaattcatctttggtgtagctatgcaaggtcctaaacattcaagcaacaaactaatagtgatgacaataataatgaatatttactgaggacttaatatttgtcagacactgtgctaagcattttaaatacattaccttaatcctcagagcaaactctgtaggataggccattactattatcactattttacagactaagaaactgaggctagagacataaagaatcttgccagtaattggcgacttaatagcaactcagggctgtctattagcaaattctatgatcttactagtatgctatgtggaataatgtgtttacaatacaattccaaatgcatcctcttcatttttcaactgtatttaacctgtaactttgtaagatattatactacttactgaaattttgcaatgggagaagaaattaatgaccataattttttcctccatttttctcaggcttgagtttctttaaaatacccagccctgaagaaaaataaaagccaaaataaagaaaaagaataaggtatgccttagcacttcgtgttagatactttttttcagtgatctctctcattgtgatcgaaaagagacagtagtaaaggccctgcaactaacctctgcttctctggcccattagctattttctaatgtgcaaatcactctggtctcccaggactgtttaagagttcagctgactacagcactgtctccttttgggtttccagttaaaatcaatgcattaactgaggctgcaagttagattctagaactgcaagttaagtaagacaggtgaggaagggaagaattcctagctttacaagcttgggaactttcaaagaggccagttcctgagtggcattaaaatagaaatagcattacttgtaaaagctgggggattttgttctttcctaccttaacaaaacttttgatagattttctctgctggagcacataaccaaatagttaaagatttgtgagataagcaggagattctctaacatttcttaggcacccagggtttgaattgaatttctgttccttttactttgtcaccattagtgaagctttatttttctacactatcccctccagatcctaattaatgactgctggggagacctgcagacatatacagaatcgttgagaagtacatttgttcatggaccacaaatttggaccagttatctacagagcatgaaagtgatgctacaaacggaaaatgaaataatcagacagcaacctggacagcctctcggggacagacgctgggcaatggcagaacctcttctgctaaacaataggctatgatagtctacacggaaggggtgccactcagaaatatacgtagctcaaatattattcaaaccatctctaggataaagcagaaatactctatacagacatttcagcaatcacattctagtcctgcaaagagcaatatttacagaaatcagaaaatgttcttgttattgcacagccctcctgttttagaatgcctacagcaagaaatgatgctggactttgtaagagctccagcacgaagaccattccctaaaataaaggtctccttgctcacaaaggaagtaatagcagagaacagcagcttccatgtgacttaaaggatatttcaccttttgacactctggtaagattaattaagagaagaaccaaaagacatcattataaatatcagtacagcatatgagcttcagagtcagagaatttcagattgaatcctggctttaccatttaatagatgtctgatcttgggcaagttatttatcaagttatttagaataagtcttagttgttatctcatttatattcactaacttatcacatgtctatggagaagacagatcaaaaccaacattattcctcatgttttttttttctcctttttttggataccaattgctatattgtcagtgtagtcaatatacttttaataaaacaggacttctgaaatacaattctgtcatggtcatatgaatataaaagaacatttatttgtaatgcatatatgaaagctttctaaaaatcattatttatgaaaaattattcctgcacccaaattacaaaaatgcaactgaaaagtatactgaagtatgatttaaaaagaaaaaaaaagtcatattttattgagcacctactatgtgatcattattgtactaggtgccatgaaagactaaaatacaaacagttcctgttctcaagttgtttatgctttgctccatgagacatcccaagtgaagaatggaatactaaaaattaataatacctattattttcctaatgctgtcatttaccagatgctgtaccaagaatattacatatattatctcatttaaccctcaaagctatcctctgatgtatgtataattacaatctccatttcataggtaaggcttaaaaaggtaaagtaacttgtctgagatggcacagctagtaagtagtaaacctgacagtgaactctgagtctatctctgcactatccaatatggtagccatcagccatgtgggggctacttaatttaatttaataaaaattaaacaaaattagagactgacttccttagttgcattagacacatttcaagggctcaatcaatagtcacagactccatttgacccagagtctatgctcttaatctttatgctctatttccctctgtggaaaacatgaaattaaatgctaaacagtatgaaactgaatataaacgctggtgaaattctgaaaagggtaacatctctgtaattttaagtctttaggcttatgaaggatcataaactccacaaggatagaaactcttttgtccatgttcacaaagtgaatggtatggagccagctctcaaaacacacttgttgaatggatgagtcaaggatgagtgaataaaagtttggagatagacttacaatgtgtattatttggactgatagctagaaaacagctcctgggcagaataacctcaccccaactctagatgttgtaaagaacaggatgtacttctgccatagcagatagaaatatttacacagatcaaaccataaggcatgaatccacgttccttccaaatacttccaaattacgtatgaattgataataacctaagactggctaaggtcagagtaattgccatttaattggcttcaaatatactaatgattatgataatgttgatactgaagaacctaataggcctggagacaaatgtctaagagagcagagaggtgaattaatgggaggcaggagtagggaggggaccattatagaagtcacaagtttggaaatcaccaaatggtaattcagtagggttgtgaagaaatttggcttttagaggaaactatgagaacaacaacaacaatcccccacccgctcccaaaaaagaacaaacttaatggggtggagagggtgaagggagagaaagttgtatttgctccaaaacttctgtgtgcagaagcctggttgggggatattaattggacaatccagggagaagccactaaataagggctcaggtggcctcaaggaaaacacttacagctgagaactgagagggaggccagggaaaacggacttgacctcctatgggggcaacatgctggcttgaactgagacacaaaaccagaaattggtacagaaaccaggtctaagtagaaacacatattaagttaaaccaagtaatgtaaattacctcatttttacacattctactccttaaatttcccatatccccaagacacatacaaacgctagtaaaatggtgcagacataataaaattatgattgtgcagcctatgtagaaaagatttaatagatgaaaatgtaattcttgagaaaaataggaaagggattttgatcctagatacacataatcttttgagaaacaggttaaccaaagggcaattgctaagataccctccctttgggttttgccataggtcccatttcatctcagatagtcatctataaaagaagagtatcttacagttggggcttttaaaatagcagaagtcctgacattcctgtcaaagggctctgtaatgtttcctgcttccaaaaccatttccatatcactctcttctaatggcatgattcatattcatgtcaacttgaaaaagcactgaagccaaagtaaggtaaaaacaaatttatgttgtggataatcagctgaaatccatcacacctgagggtcagttactactgtgctggggctgtgcagtctacttgggtaaggctgagtggcagtggcaggtcctgatatttgttctagtagccacaaagccgcactggctctcaaaaagcacaatctgccattcacttaagtctggtttgccagcaagcccaaggatggactccccactagtaccatcaggctcagggaatttggctagcaccgggcacctcagacttctgccagctaattggctttggggaagccgctgacctactctccactgagtggcttttgtgaacctggaacctagcctgcttctcatcattgatcaaccttggccaagccagctggcttgttcctttgcagacagcttgccttagggaagctggttggtggctcctcaacctactaagtgagggagagagagagagagagagagagagagagaaagcgagagaggacgaactacagaacagtctctcaaaaaatgaccagtgctcagtgtcagttacggggacttagagatgaacaaaatcgtgcctcatacctgatatattagtaggtggagtagaagtctgcatagccttaaccagaaaggtaactgagcatttaggaatggggcccaaatgaaatacaaccatgaagcacttcattaaatgagtcttattcaagtgtacacctgaattcctttagttacattcaggcacaatgtcatcatcatcaatgtcacattgatatacgtatgcgttggtgacaaggaacaaaaatctgttgtttgaaggctggtggggaaaaaatccacattaaacagagtcctatatggttctggccacccctcaccacttaccaggctggccttctagtgcctgagcaaatgttcaagcaggtttcccctgcttggggctaaatccatcagggatttttttaatccaaaaagaataaaaatatgtaacatattagataaatgctggcttcctaattcaagttcacaaatggaaatgacaaatggggacaatcaaataaatgattaacttttaatagtatccctactaaatcagggggaagaaagctaaaggaactgtttcttaggatttcagcctttctctctgtcctctctaagacaaatgcagggagcacagatttattcagctgaaataatctgtagtgctgcaactgtttagttcacatcaaagattctatctacttcatttctaatgtaattgtgattttaaaatatatacataaatataaaattgttttggagaaccaggtatgcaaggagtatgtgatagtcttctatgagccacacggattacatgcagaatcatggacaaatctttaaaacattagaacttcaattttccccttttatataatagatgagattataatactccagtggtacactatggccatatcctcaaaacaactgaggcagatggtgcacaaagtcagtggatcagattcattcctctctacaaaagcacaacttataagaaatgtggttctgatagttcattttctaaaaactcagccagagactaaagctatgccacaaggcaaaatttttctttatgttccaatttggatttaaataagatgtcatacactgacaaaaacacagacccctaaatagagttcccaggaattgaacagcttcagtactactgatgtttattcacatagtttgtaactgttaagttattccaaagtttatgttgggatgtcaggactttgagtgggaagtcactgtaaaagatagtctggtctaatcctcacatgatacttgaacttgttccctacaacatctctcacagtgctgggaaacttattgccttccaacatagttcattctatttctggacattaagtgaagaattcaaagcactgaagagagccatagttcaaaaaatgggggatgggttacttaagtcatcttttaagagctcagtatctcataatacccatagcctctgaagaatcccaagccaaatacatacatgaatatttctgatgttcccaaagaataactacattaaataaatgtacagcagaggcagtagaatcaaaatacccactacagaacctagactccttcatacactatgagaacactggaaggtaacagaatctctctaagcttccctttgctctgtgaaatggggaaatagctaccactgaggtcattataaagattaaccaaccccaacaaaagcacacagcacatagcctaaggtatattcagctctcaaaaatctgtgttattagtcttaccttcaaaatctttactattcattttgagactgactattcaagtttcatatcaacaaaacgtgaaaaaaaatcaccatctagtaatgcagtatccgcacataaaataactttttgtggtaccttaagtacattcccaaatggcttaatgtcaagacgaagctcacagagaaggtgctcttcgctattgcttatattataacttgggagttttgtttaatactctgcattaatgagggagcttcttaggataatattacaacagagagtgcaagaaatacctgtgaggtcaacgcagttctattaactgtcatctaacacagaaatattttccttgaataccattaaagctttctccgtttctttgttctgctttttgaaggcagtaggagcccaaatttccctaccaataatttctgtttttgacttggcagcataatgatactagacttgaggaaaaaaaatcaccttggcaatgtcttcttcagaggtttttacagaagatattttgttaggataaattatactaagtaggctctttaactaagcaaaaacaaatccacttgtaactaaatgacctgcgtagctttatattttttaaagagaacctacctggaaaacactacgctctttaaatgaacattttgttaaaatggaaaatatgaaacagaagggtaattagacaagtaagttgctctttgctactcctgctgatagggtaaactcagaagactctcagagttcccactgccatatataaatcaagactcaagctgtggttccagcaaaacagctctgggataatttttctttatatcctggaggctcagcccagctgattggagagatgtaatggcagttaaaagagtaaatgtataatctgtgctctctcatatatgtgtgtatatgtagacatgcacaaattgtcttctctaaaaaggtggaaacagaaaatatactccatggactgtgttgagatcactcagaataaacagaacatctggacaactaattccctaatgtaaaagaagaggatctccatactcctaccatttcttccacccaaggatttcctaaacattaggtcagcactgttaatctatgagtcagagaaaaagatgaagacctttaatttcatagagactggcaattctggatggatttaaaataatttgtcaagctaaaggatttaagctgggcaaaaatggcgtgacccttttgagatacagtgtcctcaaccttaccatttgaccttcatgactcctgatgtacactgccttctctaactcacaatcagtccaatactctaggctgctcagttatcccataaagacttttcctggaccaatcaccatcattatctctgacttcagcagtcccatcaaactttaggtaagaagcctggttccctcagaacagaatcctaaggaaaagtcacctcctaaattatgtcatttatttatataccttaagctcaaaaccccttgttagactcataaactctgctgcttattgggatttccaggactttttcccattttgtccacccaccaaataagtagttcaggtcactcttggcctaccaacagatgcaggcaatcaacccaagcatggagcaggaaagacctcttatttggccaaggctgccacacagcttggcatagatacaggaaggtcctaggcatatgacatacttggcttttaatcccatttccactttatctgcagtggggccgtgggcaagtcactaaaactctctgaccttgggttccttatctgactaatgagaatctgatacccagggtcccaattttctatactgggtggggtcttaacatgataattaaatcttaataccatgtattgtctcaccacaaatggtgacttattgcaaatgccaattctcaacctctgcttttacttcatctggaacatgggcactcacaattctactatattgtttgcactgcctacctggaatcttcatactgtgtgtattttctagacttctacaaagtggagaaaatattcacacacaacactgagcatctctgtaattaaaagatactttatgtttctttctttctttttttttttttttttctgagacagaatctcactctgtcacccaggctggagtgcagtggcacgatctccactcattgcaacttcctcttcccaagctcaagccatcctcccacctcagcctctggagtagctgagactacaggtgtgtgccaccacaccttgttaattttttactttttattttttggtagaaatgagggtttcatcacgttgcccaggctggtctcaaactcctgtactcaagcaaccctcccaccttggcctcccaaagtgctgggattactggcatgagccactgcgcctggctgaaagatactttaaagagatcaaatcaagtatgaaaatcaaaaatgggtatcaataaaacacataactatctgatttgttttgcttgttttaataacttattgtttcctccataggaaatatttagaagccatttaaaattatataagcctgctcttctcctttcctactgctgtcaatatttttatttaaaaagtaacaaacttcaaataaaatctgactggtagcaatcacagcaatctgtgttgagatttcagatgcccacagaaataaaaccatactgactgcacttcaatatattgacaagagctggaaggaaatgtgaggaaataaaaagcaaaagtttttcacacacaggcaaaaatacacaatcaatacttcagttcctacttatttaaatacctattaattgctctactgtgccttcaactctcacgtctgttaactttgaaaaaaataacatatttcttgctcccctaggaagatgaaaagcattagaagaattttcagttaagacaaaattcacaaatagaacatctcattatccatagctatcaaaccagagctcctatggtagttccagcttcattgatatagtcatcatcatcatcatcatcatcatcattgtaattataagtctcttggtgtcatatattggaataatgtttctataggcattatatcatttttaataaaatatatataatttcagatttgaagggttaagaaagaatatagtctaactggtcccctgaagatacaggaatggagactcttagagatgaatggacttgctccaaatcacatcacagtattaggtagacgagaaatcaaaattaaaaactaaagcgtaggcccaggcacagtggttcatgcctgtaatcctagtcctttgggaggccgaaactggaggatcacttggggccaggtgtttgagaacagcctgagtaacatagtgagatgccatttctaaggaaaaaattaaaataaaagtagcatggtggcatgggcctgtagtcccagctactcaggaagctgagacaagagaatcacttgagctccagaggtcaaggctgcagtgagccaagatcatgccactgcactctagcctaggggacagagccagaccccttctcaaaaaaaaaaaaaaaaaaaaaaatgcccacaaaaatttacttatgaagttaacaggattcttacaattctccttgctcattttaaaatgtgtgccacttgtccattttctttggtgggacattagctttctcctccctctctgctttctcttcttcctcctcttccttttcctttcaagacaaaggagtaagttctcctttctgaagctaaaccagtaattttaaagcttccttcacctcgaatattgttagtgaaaacctctgcttgggttaaagcccctttttttcctttttatactgttgtctctcttcatttgacctaaggtcagatattaaagactaaatttcctcatgaaatttctgagcaaattttcacttattgatgtgcttctataaaaagtttagaaagcacccctaaggccattgacattgccaaaggataacaaattacatgaccttgggttggtctagcaagtcaagctcatagtgtctcctgctaagcatgtactagaccctgtatctacattaaatctcttggtcttcacaaaaacctcacaaactaagttccaccttcagtctcatagttataaataaataggctaaagcgagttagtcttagagaagttctttaacttgctccaagtctcagaggtggtagaaccagggcttgaatctacaagccacctggccctgaagcttgacccttactgtctctggccacagtagctaatgttgacctcttccttacactaggccacatggtatgctaagctctcaacctgcagtatctcattggctatttataacatgttgtttgcaaatactattattggtgccatcattttacagatgacaaaataggagattagaaaagttaagtagcatttttttaaggcaaaggaaaaagcacacttttttggcatgaaataacaaaactggtcctctaagttgccttgtttcacctacactttggcatgcaggctggcctggctaaagaatataatgtgcgtgaatgtgagtcttttgctcacctgcaaatgtaaaagaaaaatatttgagttgccaaggtgaaagccatcatgccaataaacatcaagacaccctttaatcctttgatcagtgaattctatacctaaatgaaatgattattgctttcataaaatgtctctgtttgctactgacagtgagcaaactgagctagtatgtcctgcaacagcctttaaataaccaaggagagagatcaaaataaaaataaatcttgaccagatttataggtgcaccttgattagttcttgttattttccttcaaataagcaatacctgaaaaaaatgaaaagggaatgttgagaccagatatcatataatagatgggctttctctgacatacagtatggtataatgacaaaaaaataatgctggcccatcatttgtgacacttaccagctaagtagagcagagagaaagacaaagaggattttttcaggatgctgaatggtgccaccacttggatttcaacaaattatcatttgttttactgtacttctcaaagttttgttgtagtgtagcattttgttgctttctctaagacaacacattttccttttcttcaactgatacaatttttttttgaaaaattctaacattaaaatcaaatgtagtgtattcaagtataattccattgcttgctaatgagaaagcatatcttataagaattttaattatgtacaatgtgatgaaactggaattgtttacctactaaaccatcactttctccttcacactcccaccaacgctcagatatcttctcaaagtgagatgccataattaatagaaatgccagtcaataaagctaacgattattatttttaaaacagtgtaattctcatttttctatcaactacccttttaatgaaaacctcatttccttcaggcaacactttatctacaatggatttggccagttgaataaaaatacctgttaaaggagagaaagttcccatcgaagctgttgaaatctgatttcatttcagattctagaactaatgttgttttttgtttaaatagattttgtctgtcaatttccagacctgctgtgccatcagcctgtatggactgctgtggtcaacacgggggttgtagcagcaaattttattacagactggaaattgaattgaacaggtttacatttgaatagatttactacatcatgttctctgacatacttcatgggactgaaatccctctccatccataaagatacatttcagacagtatcattctctccaggcttagaaagcaagtcttgagccaaggagatggccaaacataattgtgcatttagatgcagggtacaatgcaatatttcactgcatttttaaagtataatagaaaaagaatattccacatttactcataaccatcccatcctttcgatttggtggttgtgggaggtggggggaggtggttaaaaaactgatattttgccatcgaagtgggcattaagaagtaaaggaaaataaattattatttgagtatatcagcaacagcagcaattccctagaaaacagatacttgcttgataacagcaactgaagaggtgtgaattatagataagcactgtcccattcactttcaccaacaatgtttaattaaacacagttcacacctcttcattcactcttaccgcccttcaggattgttcctgctagaaatcacaatggaaaaaatatttaaggaaaaatatcttctttaaacctggaaaagcaaatggtatgtaaatcatagcagtaaatcaagttaataaaaaattatatattcctaaaattggagaagtgtctccattaattcagtttttcaaaataaaacctaaatatagatcaataccacatcaatacaagtgttcattgttgtattaattttagaactttttaaaaaatggatttgcttttgaaaaataatgattcctcaactttcaaggacttgaaatcactcttaattccctttgaatgagcataagtttagtttgagtctctacaacaaaactaagtggcaacataaatataattaaggccagaaattgactgtcaatcactgatcattaactttcagaaatatgttttgtttgttactctgctataggggttaaggcaatggctaagataaagagctccacttcacaaacgtaagctaccaccatcatcctaactgaaagaaaaactctgtcatgtgggttgggttgttgttgtcttaattatatgttttcctttatcaaaattgtccttctggcaatttcacataagttttctttagcaagaaccaccttatctgtcttgttcactgttgtatcactggagcctggaatagtgcctggaacatgggaagaccttagtacatattcagcaaaaggattacaaacgtaaaacatgttaactctgaaaaatcctaaaagggccaaaggctataccataaaaagtacccccatcctcattttcattcaccaatgtgacactgtcaccaatctttaggtatccttccttccttccacttctccatgtatacacatgtatatccatcactgtgtatgatgtctgccatccattctcctttccatctctctctatatacatatatatatacatatacacacacacacactctcatacatacacacacatacatatataatgaatcatactattaataaacttgttcttatatatatatttacttagtaatgtatcttggtcatctttttataaaactttattataacattatacacttctttgtgtatagctctttctcaagggaagagcaaagttgaagactagaagaatttgagagtgtcttctttgttcctatttgataagtgaaagtcagagaaatacaatgtgaattccatatatccaaacataatctgatccactcatcttcctataatattgttcacagtaaaaatcttgaaagaagaacaaaccaggaaaaattatgacaccacgtgatggcacacactcattgacactctggttcactcttggtgaattaatatgtgagcctatttggatttaaaagttaaaaaataggggatctccagtaagaacaaaatataataataggacaagccccagaaacaaagcatagttctatgatgcaacagaagttacacatttaaatatttaatgaatctaattttctgtcaaacattaattaccatcttttcattgtgttactttataaaactgtgtttatttcaaactctggtgaattttctgaagaaagggaaacagaaaattctaaatgcagcatgtaaaattcacatttacaaacacacacacaagtatagcaatgcattaaagaacaaaaactgaatcacaggcctcacgaagtaaagaaaactttttatccatctccaagctaacatgtgaatttcactagaaatgatgaaatatacaaatatttcaggacctttgacatgtgtggaatagttgagtggcatctagaatcaataggttcagttcctggctccaccaattataaactgtgtgagcttaagcaatttgtttagcacagaacacatgtcactgttgctattttatgtttgttgttgttatccccaactgaaagcaaatagaaagcaattttaatatcatattttaagttctttgtaatagaaaataaagtctaaaagataaggttgggaaagaacaaagagtgctttaaacccaagattaattaaaaaaaaaaaatctctctgcaaacctagtaatgagaagaaaaccaaaaattcaatgacagtagcctcttggtttgtcttcatcctttgctttctgcaaattgtaaagaagataaaagcactacggtcaagcatacctggtgtgtttcgctgtacatcagatcctcctaccttgtcccttcctgtcaatgtgaagtggttagccataagttatcagaaagtccaggtataaaggagtattctgccatcagagtcagggtacttactgttacctcatctttttctggtttctctaaaactggtggaattttttgcctcccatccccacagcaaaatcaaaacctcaggggcactagcaaagagccttaccttctttcagcatgcccacttttaaacacttcatgaagcggcaagcctggcaggatttacgtctgcgctttgtgatttcacattcattcgtggcagggcagctgtattctatattgcctaaaacacaagtttgaagaaaagttgtcatatttacaagatccaggaaacattagcttcccaaaggcaatgtcaactctattattcttactctcccaccccaaaaaatgtcacatgagactcaagagaaatgtcataaatatcatcaagctggatgctctgctataatcacaaaagatacatggggcaaggagaacaaacatggtgaaatgcttcaaaagatgaagtttaaaattagccttcaaaacattatgctgagtccacccatgcaaagtaagagtcttccagagtcttatgatccaaaagaaatttcaaaatagattatgttcatgaaaacacaaatatcaaaaccagattcttggattgtcaatcctggatttattctgattcctaatactttggtgcatcaggcttattgtctttctgacactgaacagtataaacttcactgtggaaaatgatatgtaaacaaatatggcatgttatagtaagctcctagagggtagggacagaaattacatagttgttgctttagcacttaccagagccttacaacacaattctgtgcttggtaaatgcttactgatcatggtgatgataatgaagatgatggtcatcatcattatcatcctcatcatgatgtgtgttacataatttgcataattaattccaaacactgaagttccctgatgttagaacaaagaataaactgctatgaaattatatatttttaagattagactttgtatcatttatggtagtacctacatatttaaaatggcaactaagaaaccagaagaagatccaaactaaatttttttttcaattagtaccaatggcagtgtgtgggatgtgctctggggctgcctacagctttgtaaagaagctgcctttaaaataaagcttttctccccaatcagctctgtcacatagtgcttgaaggtctttcgttacttcctaaccctttccccttgtgattaagtgcattagtatcttaatgaaaatgcattctgtttattgccctcttgggaagggggaggtcatcacaccaaatgcataaattctcatcagagacggtccgagcataattgcaattttgctgctccatgtttgcaaaactcagggtccgtccaagtcccctgaaacatgcgcagattctagtaattagcatagagtctgcctgggaccacagcattgatgaaatatttcagagttaatcacactttgtaaacactgatttatattgactacctttcttcagactgacgtctcctcattaaatatcacattagtggattgcagggtagcacaaagactcaactactcagcaactgctaattcaacaagaagtaatacctaaccacttctaactactgaaaactggttaagtatgcatgacttgaaaaaaacacattatagtttgagatagcctatcagaattgcctaaattagcattctaattcagggcatttataataataaaagcaacaactttttaacaggaggttaaataataagagtaatattcattgcatcaacagaagtatataccatcaccttccttggagatattactgatgctatactcttagaaaaccaaggataagtcaaagaaaccagggtggccgggtcacagctaagaataaaaggatttataatctgaactttagatgaaccactcttcactgcagagtttcttcaaccatctctgaatatttattttgcatcaaaagagtgttgctagtaattttctaagggttaattagtattctactactagatccttccaccctgttcggctccccctatacttacttaaaaagaaacaggcctttgctgtcttaggaaggactgaacagtgactgcttaaaaggatcagaaagaaagaaaaaaaaaagtttaccaaacagcattcttttccttttttctgcctgaaaagtcagtatgaagtaacactttcatcacttcccttatcaaggcatgagtgctagtcctacgcacctttaacccagtgctaaaaacttctaccaggatgatccactgccacaaacataatcatcattcttttaaaacctgttccacttcctctttgaaaactgtatccccatccttcacatcaacaaacttctgacaagaatgcacatcaggcatgtgtgagctcacacctggactatggcagttatcccctccctgggctttttgcctccgtcctgacccactctaatccatgtggcataccgctgtcatcttcctttccctaggactgctttgatcacgtcattatgctgattttaaaaaatcaatagaattatttgccttcctgaatgaaatataaactataaggcttacaaacagggtcttctcccagcctttcatttacttttccagcaatattgctattattacctgacatgaactttttgaggcagccaatttgatttattcagtttttgctaagtgtccttcagactttcctctgagaattatctatctttgccactttttcttcttaaaattatttccaagcctccttgttcaactccaactccatcccaatctttcatgaaaacttctctgactatcccagcagaaaacgatttcttggttttcatattttttcaggtactctcatcatatccagacagataatattttgttatacctttcatacacatattacccattggatggtaagacactagaggacaatggacatttctaatgcagtataaaaaccatccaagccaggtgcagtggttcacgcctgtaattccaacactttgggaggccgaggcaggtgaatcacttgaggtcaggagttcaagaccagcttggctaacatggcaaaaccccatctctaccaaaaaaaaaaaaagtagaaaaataagccaggcatagtggtgtgaacctttagtcccagcctcttggaaggtcgaggtgggagaattgcttgaacccagaaggcggaggtttcagtgagccaagatcatgccactgcactccagcctgggcaacagagcaagacttcatccccaccctccaaaaaaaaaaaatccaccaaaaagtaatatataagtaaaagaatatacttataataacttagaattttcttatctcagggtcattattatgaatatcaattatggtgttataatgcagtgtcacaggatcaagtgagctgcatgtcccattaggaagcaatgttaagaacagtaggaaaatcattccacaaataactttaaaaatagaagaaaaagccaggtgcgatggctcacacctgtaatccagcactttgggaggccaaggagggtggatcactcacttgaggtcagaagctcaagacgagcctgatcaacatggtgaaaccccatctctactaaaaatacaaaattagccaggtgtggtggtgcatgcctgtaatcccagctgcgtgggaggctgaggcaggagaattgcttgaacccaggagaaggaggctgcagtgagctgagatcgtgccattgcactccagcctgggcaataagagcgaaactctgtttcaaaaaaaaaaaaaaaaaatctagttaattttttgaaatcgtcaacagtagctttgacaaaaatggaaaaaaagtgtggcaaaaggggaaagattatgaaaaaaatacaaaagcttctgaggagtaaagtgtgaataaaagaggaaatcataaaggaaattatatgtacaggaaataaaaatccatactgatatgaataggataagaataaaaggaaaacaaaataatacagatagatggtgctaaatgagttacataatttttatcttactttataattggagctacattggagaaaatatttaggattgattcaataatagtagctaaatctatgaatgactcatctaggaataattacgtaaagattttaaatctcttcaaaaggcagaagggaatctgtcaaataatgatatgagagttttagatcacatttaaaggactctggtctcctttctatccattacattctgtaattcttcaatgataaggagaaatgtaaaagcaggggaggttttcctagtgtgttagaatgaagtcttaaagtagaacctctgtgttattccttgttgaatcctcagtgctaatcaatgagccaggagttttgtattacggctggtttggattagagagaggtagttcctgatattaaagagtccactgagaggagacaagacgtgtaaataaacaatacattttagtgggtggtgtcatggttcaggatgcagtactggcgtactggcaagtacatacattcccacaaacacaggaattatgcttaggaagatcagcaaattctccaaataggggcaaatgcttgaactatgacatgaaaagtaaagaaatgactacactggggtaaaggactcttcccagagcgacagcaaatacaacatatgtataaaaatttcaccatgaatggatggaaatcagtggtcctagcatcttcacaaatgatatagtttcagctgaagtgtatagaaattgtttctgataaacggggtctctttcacaaatattttctttcaataaagttgccttgacacatacggataataaccttgatttcactaagtgactctggtttatatcttgaaaaacaagtcaacatcattctaaataacttatttgctttatttgctggaggaaaacctctctaatttccaggccctcccattgagttacttagttcattgttgttggctatgatcacccacccaacaaagtctttgatccatgttagagtctacagagattgtgcccttgaaaaaccttccctggtgctttttctattcaataaagaaagcattttatcctaaaaatgtgctgccccaagcacctgggtaacaatgttacgtctattttggtaatggttcaaagacatgactcccagtagaccatatgatctctatggggcacttgttttccttccattctctaaaagtggaaactagacgaaaatatttccaatagcaactatgggcacctggaatgtgaacactggatattcactcaggaggatgcagaagttattgttcacagcataggattttcatttcagacacggagttttcttggattatagcttgctattttctgggacacatttgttagatggcaccagggactgaattgggcagctactgatgacacaactggaattttcccagttttgtcaatagctagggaagtgtgctctgctgcagagggaaccaaatcaacatggaagctctcggtttttaaaccaggctgacaagaaagatagagcaatttataatatctcctggcggcttttcaaaaagtcccgggctctgattacttatttcagagtcttttgtgcaattagtttgcaggcaatataattttctcacttactgcttaatagaatcttgcagctagctggcggatagaataacagggtgtatgtaaaactccagcctggagcgccagtggataatttgtatattcctttcagtcacttaatggacttttacagtttggcagtgaaagggctgaatgatgtaaattagcatggcatctcaaaataaaaatatatgtcaaatctttattcctgaataacatcactcccacatggtaatgatgcatttggatttatgtagttcctaagacttgtcctctttttcatacatacagacatcataattgtaaagccaatttgaaagcatctgtatatttctcccaattgttttaattttattaacagaactaaatagcttgcaatgacccacagggcactccaagtggggtttatccagttgcttttcaacattaagtgatttaaaaataatgggatttgcctcagtacacaattacagagcattggaatcatgcaggcaataatctgtagtatttttgttttaaaggccctaaaacataaacaagaaagaaagaaagaaaactctgtctttattgtatagtggcaaaggtttttccatttttacagtgatctaactttcctttttttctttgtttttctttcttattttcaatgcttcgtttctagctattctgtgctcatttccacctgaaagagaaaataatactatctatagctgagattcatattatggaatagtaatttattctatatctgtaacttttaaaaagtcataattacatcaatgcacatgtaagttaagggagttatttgtttttcaaagaaggcgtccacagttcgactttaaataagttgtgtaggaacactacatctgttctcaagggattccaccaaatactttttggtgcttcctttagaactgccaccagagccactttacaaggtataaacagggtttgggaggccctatattatacctcattttcacccaaacgtattgccctttgcattttgacatgaagcccgatgatttttgtccattactaaattttaagtctacccttaaaggtcaatgatttgccatcactgaagctattgtgagactctgtctcaggctctaaaagaggatttccaaaaatactataaggaatgggtactatcactctactaatgggaccccagaccacctgccaggtgaggttgtggcatactgaagtgggaggagaggagcatcacatcaggataatagttagagttggctcttatcaaagcaatttcatacacaggagtgtgcacaagtctcatgctctttgcctctgcactgtctctctaccccataaaaaatgaggtgggggagaggagggtatagacaagaccttttgcaggttggttctttagcattctataggattaaattctgacaatcataaatgtagtatataagaggcatacagcatagcggtgcaaattgctgcattttcaaggtgaaactcaagcctcacttccaaataggaatggatgatgctttgcccttaaggaaaaaagaccggaaggatattcacaagcaggcaggcttttaaaccctcagcaatgtctagtgactggagatcacacactctggtttcatcctacagtgtcctgtgtttgggagagtcaccaaggctgcagtctgtgccagtactggccacctccctgtgcaaaatttctaacaataagattctattcctccactgtattgaatgaaaaatgcttagcttttaaaaatgctataaaatgaggacaaattacttagccttgatttttttccagttttaaaaaaactacatcttccctcaggttcccctaacttttcccctaactttgtaaacatgggcattcctttatcactttaattctacaaccatcaactaaacactaggcattgtgcatgttcattttaggacaaaatttttgtatgtccattctatgtcaatctttagcatattactttgcatacagttgagaaaaatgtctgaggaggaatgtgtgataggaggggaggagaaaagaaagaggccaggcactgtgcctcatgctgtaatcccagcactttggaaggccgaggcaggtggatcacctgaggtcaggagttcgaaaccagcctggccaacatggcgaaaccccatctctactaaaaatacaaaaaaaaaaaaaaaaaatagccaggcatggttgtgtgcgcctgtaatcccagctactcaggaggctgaggcaggagaatcacttgaacccagaaggcggaggttggagtgagctgaaatcgtgccactgcagcccagcctgggtgtgaaagcaagactctgtctccaaaaaagaaagtaaaagaagagaagagaagagaagagaagagaagagaagagaagagaagagaagagaagagaagagaagagaaataaagaaaagaaaagaaaagtagagaaaatgcaaacctaggttcaagttccagctctaccatgttattggctgtgtgaacttgaactagttgcctttgttaccctcagtctgctaaagtacaaaagaggaataatcatatctgctttataactttgtaagaattatgtgaaatgaagatattaagatcatatacatacagttttggtcccttttctgaggaaaaaggagagaactgtcttaacatcccatttattgttatttaccttgaatcctaaggctttactctccagtttgcaaatattataaaataaaaccaccttcctcagatttatacaaggatgtgaaaatgaatatgccattcactcagaaacactgaaagattttgtccttgcaacacttctaggcagaatatttagctatgttttacagatattgagaaggaaaggaagatagttgttcttaaaagtaccgaaatgtctgagaagtgagtttgtgaggcatcaaccacatctcatgaacacttcctgtctctaccttggagcacacacagtgcctatcgctgggtatgatctgattagaacagaggacaaaacatttgcaaagctcttcaaaaatcttatcccagccttatctcttgccacagtcccaggtcgacttctaccccatctcaagctcacccccttgtctgaaacccacatggcattacctgaagttcctagaaagcagcatcctttcctattgctcctctctatgtgctgcttctatcatttcttcagtgagatgatcccagggctcccaagactgagttaggggtctttgtggatgtaactagttcatcccgtacttacctttcaggtgagtccctctcttagcacttaacacactttattatatgtatctgtggaattgcccccttcctgtcccaactgtatattctttgagggcagcgtcttactcctttcagaatcccctgtgtccaagagagtgtcaggtcaagtcaatgacccataggaaacattcatttgtcaacttaatttttagtgagtctgttattcattcccccattttagtgtttagcttcaaattattcattaaaaatttagaataaaagtgttagcaattcactagtactatattatttggcataaaataacacagacttataggatatttgatttcaaagagattctaaattccagttgcttcagcccccttgttttatatagaagaccataaaaggggtaaatatgtaaggacttatctattatcactagaacctatgattgctccaccctctttataagaatatgggctagttaactgcagaaatgagactaaaactgagatatcccaacatccagttcaatggcctttaaatgcatccacaaatacttagatatcaatacctaagaacaggagaataacaaacactaagactcacaggtactctttgatgtgctttacattatgaactaccattctgtgattagagatttaaggcagagagagaataaggtaacatacccagaatcatatagctaacaagcactagagccaggatttgaacccaggcaatctggatccaaagtctgtgctcttaaatatgaggcatgctgcctaactctaatcttttaaaagtaattaattgaatgttgtttagaatataaataaaaatgaacattccatcttctgaaagagcactttgtgtagctgttgctgttgctattgttgccagtcagaaaggaaattttgatgcctgacataggagcctgagagtgataggttcagggtggatcttggcattgtcttttgctgttgtcagacttatggtgtaagggcagctgtgggataggatagggttgcttttagagaacggaatctctcaacacctcaaaaagaaatcccttaacttgtctctgtaccagtatggttggtggctggtttaattccacagaaaccaaacagagcatgtcaccaaagcaacaggtgtcaggttgtacacaatgcattttaacaatcccaaaataatgttcttgttcctgatgggaaaaaaaaagtaatccataatcatgagggtgtgttctgaaatacatttaaaaaggactggtaagtgtataataaaaatacattggtgaaaatgatggagaatataaatgtctctcatccaaggactaaagaaattcaatgtttttagttctgatataatgatgtcttcttgtaaaaggcaactgttttttacagtgtaaaatgcatatcctacatgatgtgtacagtctcttcttcttagtttttaagctcttatagtacacagatcatgtcacagaagtctttataaaagagcttaaaggtgaccactgccacaagaaatatataatgtctgagctgactataacctccaaatttgctgtgctctctatccaacatcaatttttacatgttattcttctacctgtgaattttaaacaaccttgatgcaagtctgcttatctgtctttcaaaacatgcaacaacaacaaaagccttgttaataaaatattcttggaaaagaaagcaatgctaattacatctaatgcattcactatctttggatagaaacagtttcaatgtgtacattttatggtgacttttgcagaccggtacaagtccatatgaccagttaggggcatttggatgataccctatatgataaaagcagttgattcttaaatagaaattttacttcttgagatttcccttctaccttaaacaagtataaccctttctaatactatccctaagtacttctgttcttggatgctatcaatgtgcccaaagtttgtcagagaggaaaaaatggaattagagtttgcttttaagatcaagttcatatattcaacaaatatctgcatcctctaaaattaatactgatttggggaactccttgacataagtaatggtaattgatctgtgtgtaagctgtaggaggcagtataacatatagattacgagctaacatactggagtcaaattgggctgccttgttctaccattttccgtgtgactttggagcagctcttaaatttggagttaccttctttatgaatgacatgtggatgggtaataataattgatacattatggggttgctattaacattaagtaagatcatgtatttaagatgcttagcagagttcctgacagggagtgagtattgattataatattagcaataattacaacatcattactgtactcagggaaggaatgcaggagaaagagctaagagggactcaagaagtgcccaggtaatggttctcagcacagaagtaaggaagtgctagccagagaatttcttctggccttgtgcttgtcagccaaaagacaaagaactgatgtctgagtcaaaaggcacttcgtgagaagcaaaagcaaacaaaccaaccaaagagtatgccatggactcagtcataaaagaaggtaaaacattcaaaaaacagtaattaccccaagggtcagggaactcagatagcactgctggctggattgagagaaaggcgaggaaagcccagaaaacaatggaagctcctggcatgtagtctgtacctgaagtttaaaataaaatctgtatacctgaactgtcttctatgttagggatttcagataagtgcctcgcatcccccaggaagagtaagaaagaaaagtatagaggaaaacttagcagggagagtgggggggttcctgtttgatgattgtccaagggacataggatgaaaatgcctcctccactgtgggatatttgtttaactctaagtcttccacagaagagcaggggtttggttggcaagcttttttgaaagggccagattgtacatatttttgtctttgcaggtcattcagtctctgctgtgactccttaactcagctgctgtagcacaaaagcagccacagaccatactagaataggtgtggccatgttccaataaaactttctttagcaaaatggatttggcccgcaggccttggtttagccatctcttgtctaaaccatatggacaaaaggctgcaacgacaaaaatactttacagtctattatccattatttcctttcttgctcacgactctgtaaggtagtttcccccaagttaggtacagaaactttttaaagaaatctttgtaaattgataataactgagaagaacagatggaagaatgagttggaaaacttttactttaagtatcacaaaatttgaaattgttttccatataaaacataggcgaaagctctggggcacagtgaggtttttccaaaagcaggaggtactttggaagtagtgaagatgctctggaggcaaaagcaggggaaaaaaagtacacttgaggacaacacattgggctacattccttcctttgaagatttttgtgcttatctctgatcgtcctcaaatggaaactgtaaatagtatgcactgaaaagaaaatggatatcagaatgtagatttgggatatgtattcagattcattctaaaggtaaattcatattttcagctctacattctaaattaacaaagatgtccttgaactaaataatctctcagtagtattctttctagtattatcagagatgccctttttttaagtctgctcaaaccaagataaaatgagatttaattccaaataatacagcaactttttgttaaaaatagattaaaaaaatttttctctttctatcattcatcataagaaaaacaaaaaaaagagaccaagagcaacaacaacaacaacaacaaaaagggactgattctgagctgccttctggagtggtcacaaagtttatgcaaatggacaattattctcacatcaaaacaggagagaaataagcctctttcttcctaaaataaataattaaataatacagaagtgtcatcagtggcgacagatttttaggatcagtttaagactaacaaacaaaaattgggtggagaaaggaatgtcagatgataaaaatccagagaactgacacaggaaatggaaatggtggtggcactgaagagttgcgctctcaagcttcacatttaagggatttctaaaaatgaattgcaaagcgtttaggtatttttaagacttagttcttactgtctcctttctaaaaaccttgaatattatctaatcataacatttggcatattcttaattcctcatttttattttaataacttaaatgattttgcccatggattaaaattctctcaagaaaaatacaatctaaaatcattcaatcttttaaaagcttttaaaatatacaaggcagtgtaatgaaggggttaagaggacaggctctgggttcaagatttcggggacccagttgttctttgggcaattacttctctgtgcctcaagttccacatctataatagaagataatataatcatgatagaagtgcctacttcattgggatgattaaagaaatgagataattaatgtaaagcacatagaacaatgtgtgacactttgcaaaatcaaatatattcattattattataaattaaactaatatatttattattactattaatattattggttaacaaattcttcacctaaaggcattgcattaagctcaggaatcttaagacagctatgtacattatccatatatataaaattacttatggataagcctaaggtgataaaagattagaactttggtgtatatataaatttggcatatctataaaatctctcaaaaatatttaaacattcacctcctacccattaggatggttgctactgaagaaaaaaaaaaaaaaacagaaaataaccaagcactgaaaagaatacgaagaaattagaacacttgtgctctgttgatggtaatataaaattgtactgccgctctagaaaacagtacgggagttcttctaagaattaaaaatagaattaccatgtgatccagtaatttcacttcttggtgtatgcatacatccaaaagaattaaaaataggatctcaaacaagtatttgtacacccaggttcactgcagtattatttacaatagccaagagatggaagcaacataaatgtcagccaagagaggaatgcacaaagaaaatgtggtctatccatacagtggaatgtagtagtcctctcttatttgcgatttcactttcagcggtttcaattacccaaggtacagtacagtaaaatattttgagagacagagagaccacattcacataacttttagtactgtatattgttataattgtcctattttagtattagttatttttgttaatctcttactgggcctaatctataaattaaactttatcaagatatgtatgtatagaaaaaaaaaatcctcatctctatacggttcagtcccatctgtggtttcaggtatcctctgggggccttggtacacatcccctgcagataatgggggactcctgtattattccatttttaaaaagaaatcctgtcatgcacaatgacatgaatgaactttgatgatattatgctaagtgaaataagccagtgacaaaaagacaaagactgcatgattccacttataggagatatctagagcagccaaactcatagaaacagaaagaagaatggtggctagcagggactgggggtagggagaaatgaggagttgtttcatgagtgcagagtttacatctggcatgatgaaatactaaagactcgtgagctattgcacaaccatgagcatatagttaacactaatgtactacacattaaaaaaatggttaagatggtaaattttatgtttcttaccacattttttaagtttaaatgtcagttcttttaaatacaaacagattagcttttaagtataaaagctaaaatactacaccagcatcctgtacctaattttgagcttatgtgaaactttttaaattgtataaatcagctccaatgactaggccgtcacatcactgaagtctcattatcagcaactttaaaagaaagtgaattcatgtggtttataacttgagtgagttaatgtgttttataacttctaagaaattgtctaagttcatctagtagtatatcaggaaaacacatcactgccctgggctttaccaaaaaaagaaaataaaatcctgacccatgacttttactcatgtcaaaattctgaaccccacccagccatacctcatgagttacctaacagcttctatagtttgacttttaacaagaactgatgctccctttcttacagatttagcaaatcacattgagtcatattcccccacaactagttaccaagcaaaagtgacccacatcaataggaacttctgacaacacaactctcatcattcattttttgttttctttcctacatttagagtgaacattctaatataccctatctggctttagccataaccaattttgagttcactggaggaatggcttttattgtataactatttgaacatatgtacaaaaacatgcattttgaaaaatataaagcacaaagtatcattcctattgttttgctctcaagcatttaacatgccgttcagtagactgaggctattctagcagggtctgaagcagccttatttgtcatgacttggttctgggttaagggagcacaaggaggaatgaaggaaagctattagagtgctaagaaaggcactcatgtctttgtttgggagtttatcttgtaatcaaagaactgcctccagtaccttcatcaaaacaaatagtcatcagataatagagattatggatggcatgtcctctggggaaagtccagtgatctgtaggcaaagagtcagccacacccgcttcctgaaagtccactcacaaatttaaaattccaccttgcaaaaggcagaaaagtcaatggcatttttataagaattaattggaagtgatctgtgaagtcccttagactggaacataaaaacaatacaaacttccttctcaacagttactcgctaggagagctcagagacttaacaggttgtagtttggggcaggttaagagaactctcctccccccaaaaaaaatcagtggaagaaatggtaatgcaagggcttcttttccataagagaatgattgaatcgggaacaggtacgtttgagtaacccagacgggtcaggataggggatgctcccacactggaaccagataggcaccaggtcttatgccagctgcacccacagtcagcacctgaagggcagctttccatccacgctactccgtccgaggacactagctcaggagatctatagggaattgattttattttctgagtgcagagggttttattaaaggaaaaataaataagagtacatgctttgattaagtatgcgtgtgtaaagagaatttattccagaattacatccgtattttttttggattctaacataggccatatcacacagtagaatccatgaaatatgggcttatgtaacaggtactttataagttctgttaaaatataaagatagaactaagtttaggccgggtgcagtggctcatgcctgtaatcccagcacatcgggagaccaaggcgggtggatcacctgaggtcagcagtgtgagaccagcttggcaaacatggtgaaaccctgtctctactaaaagtacaaaaattagccaggcatggtggtgcatgcctgtaatcccagctactcaggaggctgaggcacaagaatcgcttgaatccgggaggcggagtttgcagtaagccaagatcaccccattgccctacagcctgggtgacagagcgagactccatctcaaaaaaaaaaaaaaaaaaaaaaaagatagaacgaagttgaaaaattatgaaaaagcttatccctttattaaatgtaactatcatgaattagtgatattgctactacaaagtgtattacttaaaataaataaggctgggcgcggtggctcacgctaatcctagcattttgtaaggccaaggcaggtggatcaactgaggtcaggagtttgagaccagcctgactaacatggtgaaaccccgtctctactgaaaaatacaaaaattagccaggtgtagtggctggcacctgtaatcccagccactcagaaggctgaggcagaagaatcgcttgaactcaggaggcggaggttgcagtgagccaagatcacaccattgcactccagcctgggtgacagaacgagactccatctcaaaaaataaataaataaataaataaatatttaatatcagcagaggaatatgaaacccattctatcacttcttccagatcactgtgaagtaacagagacagtaggaaagaaggttacccttttgcaaatacattgctaggaaaattaattttgtttgcctaatctgacatgagctatagttgggcattaagttttgttgcaaatttgtgtccatcctgaataccattggcatataccccttacatgggataggctcttacgtagtgtcacccaacaggaaaatataccctacaaatcaaagctaaaatgatatgcctattttaaatgactttcaaaatagagtaacataatgctatgtgtttaataaacatgtaaatcacaccagagattcttttttctgcaaactggagtttctaatatttgaaggacaaaaatctagtgaggatcattacattttattctatttttctttccttgatcaaagatcaaccatgaaatacaatctctgaaaataatcactctgattttgcacaacccaaagatcttttttcatcagccactctgttactttgtcttaatttacattgattctgttttctaattagctagccaacacacacacacactcacacacacacatatattcacgcatatatattatagtgctcacagatgtgtagttcaaacaggcttgaaatatccaaacagagaaaagagactagaaaattctgaagaagtaaaaatattctgaaaagggaaataatagactaaaaaaagtcattatgatagagattgggtttcaattttataaatgatatgtacacaaaactgcctaggaaatcctttggtataaaaatctttttcatcaatgttgcctgcaaggaagaaaaatagggtgtcttgatttagaagttacccaaactacgaccaacaggtcaaatccaggtctgggcttgtttttgaatgccctcaagctcagagtgtttttttatatttttaaacagcttaaaaaaaaaacaaaacaaagagtatggaacagagaaggcatgtggcacacagatcctgatatatgtgataacctaagatatttaaactatttaatttattatctgtctcttgaaaatgcctgctgaccagtagctctttgacaacctcaaaagtataatttaggtgacttcccaagtcagaacaaaccgtggaaaaggaatcactactcatttgtctcaagaagtggttccagtaagtcaaaaccaggagaagaaaaactaaattatgctgttttaggacacccattcatatagtacttcttcaccaaaaaagaaagattgcaatattttactattaaaataaacactgaacctaacaattaaaatagcaagagtagaatgatatttgttatttataatttggcaactttaatgcatttcaaaaactcagacacaactggcatcaaatgcaagaagtggaaaagtcaaacttacaacaaaagcaagttaagagttaaagtaggctgggcgcggtggctcatgcctgtgatcccagcacttggggaggccaaggtgggcagatcacttgaggtcggaagtttgagaccagcctggccaacatagtgaaactctgtctctactaaaaatacaaaaattagccaggcttgctggtgtgtgcctgtaatcctagctacttgggaagctgaggcaggagaatcacttgaacccaggaggtggacattgcattgagccaagatggcaccactgcactttagcctgggtaacagaaagagactctgtctcaaaaaaaagaaaaaaaaaagttaaagcaatgaattatatacaacatttctttggaaaatattacttctatatttaatttaacactgcattcaaactgataatcactgcgattcatcaagtcaatttagacatttccatattattttggatttcaattttataacatattagagttttaaagctaccaattactataaactgaggtagttattttctctagacactatttgggttaaatacattttattagtttcctttggaaagttcatatcatgtacactcaatttgtaagttcttattttctctatggctgaaaacattctaagactgaaacagcacatgatggcaaaagaaatgcaacaccaggaaagatcctctaggactacactgcctgcttcaggaaggagtcatacaattcagtgtagtaaagcagttgattgcatcagatccaagggctatgcccgcatgcctttagcatatggcttgcaggaaaatgactaatcttaatgccccatgtttaaggtgagatttaggctcacattaatgccactttagcctcagacaagaaaagcccttgcctgaaggctgtgggctttagaaggtatacgtagcacaaagatcccactcaaagtgtgaagggaaaaaagcccagctggagccgtcccctgcgtacaccttgatcctgagtacctgagaccctcaaactccctggctagatcaccacaagcccatggaagtgccagggcctgagcgggactctctcttgggtctgttctctggaagctagactggactaaactgcccttctggtgtgcacattagacctgggcgtggtcaaggaacagctgtttggaaggggtcactgggccttagacatgtgggcaagggtgtccacactatgtacaagattgggagatagaggagagagaaagaaaggggatgggctgcaggctatgaaccagctctccttgcactgcctctcactgacagaaaattgttccttggagtcaaagactgaccaataaaaagtcagtctcccaggctattatgaaggtatagttggtcaaataagagactagaacaaatttcacttagtgatttggtatcttgatttataacattaacatatttacatatactatgcagtatttgggtgcttgctgtactcttgtcctaggtcctgcaatgttcagagtggacttagttccataatggtcactcccacacctcacacagggaagatatgctactacttcagtgcctaaatttcacaagtgaagctaaactgagaattttatgttttatgcaagttccaaaattcaggcttgttttttgatgtatgcagtttcccattcttattcacagggaaataaagttaattgagcacgataagctaaatataactaaacaaatttccagacagttcacctaaatgcctccaatcatataaaggcaccatcagtgagaaatggctacagggagagagggtttacgatcatagctaaagggtggagacagctgtgagctctggaaggtgacatacctgtccttctagtttagcatcaaggataactctgtgctagattacacgaaccatccagcctctgggtatcccagtcatattcccaatatcaaccaaagttaataatttagtgtacatttactatgggtcaagtacttcgatattcattctctcatgtaaccctcatcacttgggaaacagaggaaaagaggggttaaggtctcacagctggtaagtggctgagacttgggcctggctttatataaatccaaaaccgatgctataatgaacatctttttaaaatctcatatttttaaatatacaatttcccaccttttaaatgtgggggaaagaagaatactttatttctagcactataatgaggagttagaatggctatattatctacacaaagaaaactatttataaaattattttctttattatatggacataaaaacttcaggaggctagtgttttgtctattaaataatgaaatatgtaatacttgggtattacttatacttgggtataaggatgttttccttctcttgcctccttaacaagagtctaggggaaactcttaatgagaagttcccaaaaaaaaagaaaagaaaagaaggaaggaaggaaagaaagaaggaaggaaggaaggagggaaagaaggcagactccaatcatttatgaattaaggccaaaattggaattggaaaaaaaatcagaagaataacaatatcacatccccaaaattactatgcctagaaaatgacgtgaaatcactgctgccactgtaaccctattggatgacagggtagagctgtcaaagttttgtaaaaagtattttggtcagccaaaaacaaaaacaaaacagcaaaactttggcttctacccaactaaatgctgacataattcaatagtttttcaatgataacttgaaaatagtcaacaagtaaaatattcctttctatttacctttcattgaaatccatgattaattgtctttcacaacagaaatagcacattcagctctgaaaagaacaatttgtattacttttctcaagatatggtctggatatatgttcttttggtgccaagtttaagaagtatttttcccaactttttaaacgtatatatttattacacactcgataaccaatcctaaaaataaattgttaaaataagaagtaagatggctcatgcctgtaatcccagcactttgggaggctgaggcaggaggatcatttgaggctaggagtttgagaccagcctgggcaacatagggagatcccgtctctacaaaagagtgaaaaattaggtaggcatggtagtgcatgcctgttttccagctacttgggaggctgaggggaagggatcacttgagcccaggaggtggaggctgcagtgagccaagatcacatcactgtacaacagcctgggcaacacagtgagaccctgtctcaaaaataataagaagatatattaaaaaggaaagatcttaacagatgatggtgtacatgaaaatgcctatggatgcacacgtcccttaagtcaatgagagtagaaccaggccctggtgaggcaggagtcacatttatgtaacggcctgtccattggggctctagtctagcaaggcttgttgtcaaggggagttacataatctcttccttttccttggagagctttaatggaggggagggagagactacgatctgttaagggtggtttggctgcaatgctgtctgaaggcatgagaatgaactctaaggcagcttcagcattggaataagagtctgggccacactcaacatctttggagttcaactgctatcactaccgtatttggccacagaaaggaggggccgttccaatcttccttacaattactgctctaattattacattatactttcacaatttaatccctttatttgcctcactgcctttttggggctaagtgagcaccacagtgtgatgtctgatgatgtagctagcagggtagcctcaccaagtgctgcgcagctgccagctacaagcacagccaggtgggcaagtccagagtgctaatctggacagtgacatctctgtctcctgctcaaaatccttgaaacttgctctctccaatacggagtaaaactgagcacatacatcaatgccaagaatcaccctgtgctttgctctgttaagcttttggtagcatttcagcatcctaaagaataatcatgcatagaattccaattgctctattctaattattgctcagtaaataactattgcagagctattaatgtctaacctataaaatgttttgagacatgtattaggaaattttttcacactgttattctatctttacaaaacataccgaagactcgagggtttaatcccctcaaccctaaaaattgttacttcctcaaggcaggagacatttgttagaggaattcatctcaatccacaacctttgggaacaaagctttaataaaatgtggataagaggacactccaaccagcctgctgtctgaatcacaggttctcagtaaatattcgttgaataaatgggagtggttttcacactgagaacctcttgcttatatcagcgcactcagtgctcatgaatttatcccaaaatatttgcttatctttgtgtagttaaaattcagagctgtgtaaactgagttaacaaaatcaaattaataacagtttgaattgtatatactttgtaaccataaggattataacactgtggaacaatggctggtaaacacccaaagatttgaggtgtgctttcattctcaagttttgtagtgttaccaaatagactgaagagatttctcaaatgctcagaagtgatgaaaagccttgtgcacagaccattgtttttagctttctcgctttccatgtgattttatatttcattttaaacttaagtattctgaggttaatgccttcaatttatagatgaggataaagaaaataaaaatccagtaaatgaaagatttttgtaagaaaatatcaataaatatagcaacgatgagccagaaattataaagatacagctatgaagatgtttaggacattcatatgtactgcatactaacttggttttgtgctcttcatttaaaactatgaaaggctatgaaaagattaggattaagtatctcatctactatgtaagagtatgatgtcttgagaaattgtgctttgggtaaactttttttttttttttttttgagactgtgtctagctctgtcaccccaggctggagtgcaatcatggctcactgcaacctccaattcctgggctcaagcaatccttctgcctcaacctttccagtagccacgactacaggtgcatgccaccatgctcaactaatttgtaaattttttatagagacagggttctcactttgttgcccagattaatctcttgaacttttggccttaagggatcctccagcctcagcctcccaaagtggtgggattacaggcatgagccactgcacctgactaagtaaacattttgattgtgttctcatcagccacagatcaaggaagttatgtaacagacaacaaaaaagcaagggagagccagtacaagtaaggattgtcactaaaatattcagtgcaactgatgaagaagagttgaatttccagatgctcttaaaagggaaggtgggccgggcacggtggctcatgcctgtaatcccagcactttgggaggctgaggcgggtggatcacgtgaggtcgggagttcgagaccagcctggccaatgtggtgaaaccttgtctctactaaaaatacaaaattagagaagcgtgttggtgcatgcctgtaatcccagctacttgggaagctgaggcaagagaatcacttgaacccaggagatgtaggttgcagtgagccgagatcatgccattgccctctagcctgggccacaagagtaaaaatctgcctcaaaaagaaaaaaaaaagggggagaaggtgggagactgctctatgtacacataaagggtttcagaatcatgttttgtgaaaatatttaaaaggattagcacttaacaaacattacttcttttgtactttgaaaactagtacgtcacaaaattatgaaggctccacataaattagtttcagttctgtccagcaaggggccattagatgatgatggtctatggtcagtggtgaatcagcagtagcatggtctagagcagggggtctaaatttgaattagcatcaggattacccagagggttggtaaaatgcagattgctaggcccaccctcagagattctgtttgagttaatacaggatggggcctgggaacttgcatttcttacattttcccagatgatgctggtactgctggtacagccactgcactttgagaactgttggcaaataatacaacacagtacagtgcagtgtttcttaactttgcctttacattaagcatcacctaggaagctttcaaaaacccccctttccctggctgtacccaagaccaattaattcagaatttggggacatgagccctgacatcagcatgtttttttaagtcttccactgattccaatgagctggcaagcttgagaaccactgatatgtgggaagatagactttgtgtccataactggttgttaggaagacacattttgtaaaccactgagcagaaccattggtgtgctgtggatcctcaaaatatatttttttcttcccctattttcttcaaaagtgaattacaagagacctaaaaacgtgaaatctaatttttttgccagaatatatatctatagctttttcatgaactgaattctagatctgtagattaccagtttaaaagggcataaacaaatttcagtcctatttttctacactgtatggcggaaataatgttatttataaatctgaaatctatgaagtttggggtatatatcacttatatatgttggaggtatattttatcattcaatgccattttattggtataatttggaaggttttttttaatataaattcatttaaaagttagaaaaagtatatccaaccataaggaaaaaagaaagatgagtaggtaattaaatttgtctagagcagtgattcttaaaattggtccctggaccggcagcatcatcagcattacctgaaaatttgttaaaaatatacaatctcaggcaggcccccaccccagatctaatgaatcagaaattctggaggtaggacccaggaatctgcattttaacaagatttccagatgattttaatgcacactcaagtttggaaatcactggtctaaagtatttattatttccatgcatctgtaagaagatccaaaggggtcaaaaacactgttagtccaatgtgcatttgtacagttgctatatagacccacattgctctaataataactatgctcttgtaaactctacccaaagtttattatccttgcaccattaaagcttaacagtaagaggaaaattaatagatatggagtatatctggggggattttattctataaatcttccactatcaattgtaatctatttccattttctactcaagagagaattaaaactatgatacttgacttatgagaataagaataaggaaaaacaaaaacccatcatgtgaggttggaagtggggagagtattcccaggtccgacactaaccttgaattgtcctcttgaagaatgccttgcaggcttcacatgatgctaccccatagtggtacccagaagcgatgtcaccacacactaaacacagtctcttgggcatcgagttgagcatgtattcacacttggtctggggatcttcaacaatggtgctggagcagtcatcatacagtttcctgacaggcccactacctcccaggataggagcagaagggtagagaggtggcgagtcaagtccgttctgatggccattcatggttgaactgtagctcccactggcgtctgaagagccaccagggctgtggtggttgacgctgtccgtcagggaggctgggctggaaggttccgtcttgatgaaggacgaacagctggaatcaatgtgtcgatctttgtttgacattctgcagagaagcctgagattgaggagatacaaagagagacagaaagaggagagagtgtcaagcacagagaccaaaagaggtagaaacaaaagagatggtgaaaaatagagaaagggaaagggaaaggtaaaaggaggaaaaaaacagaattcatatgttaaagacattgctctttgagagagtttcctaagggctagggactacacatcattcattctctagtcaatacttcttgttctacaagaaggtaatcagcataagggcatgacagggttacaacaaagggcccagacaggccataaacaaaagctctaaagagtccgattgcttttattttacctttctcttggagaaccagtgtcaatatctaactcaactctagattctaaatttatcaatggaagaggtggtgatttgcaaagtctataccatttctaaaattgtatttatcctcattctacctttccttcctcattctgatgctgcaatcattttattatgagcagaataaaacttttattttcaagactgaacagatgatcctcagctctgtaattactgtttgtcagcacgcttccataagcataactgtgtcttattgatctgactaaaacacatagggaatatatcctcaatcactttgtttctttatttaaattgctctatttcatagccatttggcaatatagaaagacatcaagtataaaattccagccaatatttaaagattattcctagagcctgcaaaacttagtgactcatcaccaacattcattaataaatacgtgcatgtgtttcttatgtgtgatttgccattatttaagagatgaatcagtaaaagccatttgagccttcagtatacctgtaagtccacaaatctgatattatatgtatattatctgatactataaaatctgatgttatatttacattcagtaaagtagaaatgtagcatattttgtcctaaaaaatatatttgtgatggtccttcccccacttctttttgccatttaacattatacctcctaaaaggaaaaatgatgaaacatctaatctgacacactgtttctcttatctagaagaaacacttcatccctttttctttgttgttctcacaagtgaccgaatttctggaaaggtaattagatgaaaagatataattggtcctattttcttttcatttagccattgtgcaaaacctcgtttagcaaaatgtctaagaagcttctgagagcccactacagaaagaagaggtgacagtcaagaaagggacttagataattgcctcccagtggaaaattgatttatgggaatccctctgggtaatggtcattcactagaatttgggggactcatcacaggataaccaaagggatgcaattatctctttcactataaatctaatgatatttgatcattgcacaaatttcatgccctcctccaggtcctccattgttctgttacttcaaaatgaagaaaaatatggaacttttctggcaggaagtttcacttaactgttccaagaaggcggtctcaggagcaaagcgttgaggcaagatttgcctcttaccaaagatatttcactttgagaaatcttgcacagctttctgaagtcaagcagtatcaggatgtgaagaaagcaaataggaaggcgaaagccacgaaaatatcttcgtactttcgcccacccacttgtgttgtcctttcctcaagaactagcgaaagaaaaaaatatccccctcgccagcctgaactacggcgtcctctctcttctgcatctgctgccttgtacccgtcactgttaatgaacgttgtaattaatagatcgctctccttgtctccttagcactctgggctaagcactttcctcaagtcatcgtttgaaagaaagcgggtcggcactgacttacagcagccctgtgaattccttttaatttagagcacttacaccaccacttcacttattaccttataattactggactgtgggcacatacattatgatcttagactagagttagaagtttttagggtactaaaccatgcttgctcccctttcctctctccagcactgaatttcccacagctatgacaattaactctttcaccatctgcctacaaggcaccgttttttaatttggaattttttttttcttttttttttttttatccagaggagagttgcttggggctgcttgatcttcagaccctctttttaaattttttttccctctctctcttttcctgtatcttccatggtcactttcaccccaattttctttttttcaggctcttcctcatggacttgcaaaatttgcagaactcttgatttaaagaacaaggccagaaattgccctcccatttatggatcagttatttgctaagccatcaaatatttatgtgtcaaatgcatgttgttaaagtccctgaaaaatagggactctccagcaagttgtctcatcgaaaatctcagtccataacttggcaataggctggataaaacaaggaaattcgggacgtacaagctgccagaaaggtccttaaaacagaagcactgtcttctcctaaacaaggtctggccactggagccatacatgaaagtgaaccaactggatttgtgctgtaggttgtacgtgtttttggcctgccacgaactgtttccttaattaatatcttttgcccagtggaaataataaaagtcagaattgccatttatcaagtgcttattatgtgccaggcactgagctgagcactttacaaatattacctcattgaatccccaagataacttcgtaagggaggtatttctctttaggaaaccgagcctcagacctttcaaaatttgctgagggtcatacagctaggaagcagtacagcctgaatctgaactcaggcctgacttcaaagaccagagcagaaatgtcttgaagacaacagagtttttaatggtgtttatttactcaattttaataaataagcaagcaagcaaggtagaggtggcacgcagagatctactacttttatttctcagcaattatatccacagcccacgcataagtggaaaaggggtgaaggggccactgcgctggttggctggttgcaggtctgccctactgcatcacccacccagggtgtgcagtgacacctaaacagaatctctgaaccaacacagttgtctcctaattactacttagctcattacactgaacacttcctagacactattatattataacctaaaactacagcgagtcttaattctctgcctctctgtctctgaaattctacagctctattattcaagtctgaaatattcacaactatctataaattcaattgtcagctggtgggttttattctagacttcacttcaatctaaaattagaggcactaaaattcacattaactctaagaggaatgtagtgaataggactttatttcaaaagaacacctttttgtcagaaagagccattttcaaaatgatggctttatctgtagccaaagagaataagcccaattccacattgtgctgttaatgcagaaattttaagtcacattggattaataaaaatctaaatttagttaagaattatgaatagaaataacatgtgtcgaaatatgtgggaaatatttattttaaagccttagtatggttactattattattttaagagaaatggtgagatgaacagggagcaagaccagctaactaactcccttcccaaaacctctgaatgaaccccctgagaataaactagagggggaaataacaatgtcaagaataacctttagtttctatatgagacactaggttttattttattattattatactttaagttttagggtacgtgtgcacaacatgctggtttgttacacatgtatacatgtgccatgttggtgtgctgcacccattaactcgtcatttacattaggtatatctcctaatgctatccctccctgctccccccacccgacaacaggccccagtgtgtgatgttccccttcctgcatgagacactaggtttgaggaatttaacagcctacctgaaatttcaggactttaaaaagcatttcaaaacagtttgagatacagcatcaaataattctgatgatcatacttcaacctaggatgtcatttcctagccctgcttagggtcagcaagggtgaaaattatctttggcattagatactaatgatcagccaaataaaatgtcttagttgtttcactatttaaagaagtaatttttgaaagttaattaatggtgtgtatatgtgtgcacatagagagagtgagagaaagaaagaataagaattaaagttgctgctgtgggggagaaaaggataatctgtaagttaatgttcaatttctattgtaattatcaagcttaattgttttcggagattctacctacatccaggtaaatgtgtgatcgtgaatgaaccgtcaggagtttgaattcccacatgcacgtgctgatgttcaaagtggtctgcatttcgatggaaggtctgaagctcagccagtgcttgtatttgttaaactctggaataacaataatgttccatagggttatacattattaaccctttcaccgaaatacaagttcttaacaagcagctgtatttcatcatgtgaattttacacagatcttgaattcatttgctactgtatttccaccctaaaacaaatggagaaataaatgggaaaatgggtgcataaaattctcataaggaatgtgtgtacagatcatcttagatcttctcatgtgttatactaaggcaatatcttctgcaacttttactatatctataccaatagtaaacgctttggtaggctaaataaatgtcaattaaagaagttaacacaatttctattcttctttgtcatccttaagggcctggaaaggtaatcatcatcattataaattccaaatgctttaaaaatttatttccaatgtttttgtataaggacacaatgcagcgaatctccaagtttacatacaaatacagagataagaagagtcctcagctcctctgtgtgattcatcagaatcacagaatttcagggacagaaaagaaggttatcaagtcccaccacctaatcactactgattcaaaacaaaaatgaatctatggggactggttgattttctacattctgaaattaccagattaaatatttaagtatttgtgttttaaaaaataaaaagctcttaatactctatagtgtgtgtgtgtgtgtgtgtgtgtgtgtgtgttttatgcttttagaagaaaacctctagactagtgttgcagctcccggaggtacaggcttcagagcccatgaccccagcagctcccatggcagcctgagttacaacttcaagcacgctactttacaatgagcttttttcccccctgcttcaactaattgcactctcgtaaagtggcaaaatgtgaatcacttagtaacaaaatgggcaccagctgctattgtcagagaatggtgatgctgaagaaagggaaagcaaccgaatgaagtgtcatgtcagaaatcaacggtgcaacgtgtgatttgagaaaacatgactactttacagagacagggtgtcattatggcatcacagtaatacgatgctttgacaactgctgggtctaacatatcatcattgcattaaggtacactggcttagttgggaaaagaagagaaaggattttttcttttaataagaaatatcttaaggtctgcctggttaacctaacggaaggagatcattaattgtaaagaaagaattgtgaatcctgacccacacgctcagaaagataaaaacacatggacaacttatgcacacatacttctgtataattttaaggcctcctttaataaaaattgagccctatctaatagaatggatttctgtataccaggatcagaatgatttagatttagtaatgctgcttcttgattctttgaacaaataacttgtgcatttagttcaaaagactctctctagcttactccatgaagaacaagagtaagaaaacagctgccctcaaagctggtgcctgagttgctgacaagagatagagctatgtaatgtggggacatagagccagccccctataaagaaaaatcagagctgaaagctctcccaactctgtaaaaggctctctgctgcaagcaaaaaggaaattcagtacaagtaatcaagaccttcaactcatttctggctgatcatcgaaataaaagtgtcccatgcattataatttcatacctactgaccaaactcttaacagcaggacctcactgaaaccctatctgcttttagggttgtagagttcaatggtcctttctcatttaatttttttctaatattaggttggtcaactatcctggttttagtagtaaaatcccatgtcctggatacccctaaatccgaggtaaaccaggatggtttgtcactcaatctgacatataaagatacctgtagaatcctatgtcttcactcttgcaaaatataagggattttgaaatggagacaattcatttcttgcaatggaggcccagaaatatggcaaaagaaatgcactaataagatcgactaaactaattaggactaggggtgttgcaagtatgtatgtagtgtaagtgtctgtggacacagcagcatcccattttactatgctgtgcaagctggaagtgactgctgatttccttaagtcatccagactattttagatgtaggaaattgcagttgcttcaatttgtattgccaggtgatttcttatgcttcctggttgataaactttattaatgggaaaagaaatggtcctgtgatatcacaatgtgttgcacattatgattgttgacagtttctgtatttaaggattcgatctgatgcagaggcgcttagtagtgcaacttatccttagcttgttttcttggacctatttcaatctgggggtgagcatctcttgtttatggctctaaatacagtaagtgagttactgacaaatcaataaaactgttaaatgcataataatgccgagtaattgcatacatgatgttttgcataattaaccatctgagcttttctttaatataatgggcactcatgtaatatagagcagctataagtctataaaatatacacagtttatatgaaccgtgattctgcttaaaactctggctaatcatctacatcggctttgaagggagagctctcctccactgccaagtccaaatcaattcttatgacattactttataactaacatgatatttaactgatgatggctattagctattatacagattgcactcaaaaactgtaacagtaggggggaaataccatttagtttaaataaacttctgccatgtaatcaatattattgaggcaaattaagtgttttaacaagtgtgtatatttgccctaatgcagcttaattaactatatcctcacaactgctcaactacatgacgccaatggatccgaagagagaatctcgaaaacctcctagacggaaacaaacatgcacagcagatggaaaaacaagcattttgtctccaatccctgaaaatatttcttactttacacaagttactcttctgcgaaccaaaagcctaaagactgaagggctttcgaacagtgtgctatagtcaaccatttgggtagtacatgtcccagtcttgaccaggtcactatgcccagggtagagtctaacagccctaggcaatgggtggacaccaccactaaaacaaaaggtttctatgagattttataaaaaaaaaaagtacccaagataaatcattaaaatgaagcttacaatatatgctgaatgtaacatttattcagtgttagaggtttactatgccatgagcagacctcctctgcagtaagctttctaggggaaagcaatagtctcctacttctacaaatctctggtctttcaaacagaaatatggatcaataaagtttgcttgtgttcagacaattctgttttcaagcagtcaaggagcacaccaaagagaactcgacacagaaggggactgacagctaaatgaagaccttcccacagcaccgcactagagaagaaataaacagacattcaactcatagaaagtctatgcactgatctctacaaattacattgaatatagatgctttactcacagacgctccagtgatggagttcacaaatcaaatcgaggtcaatgaaagctcaggcttcctgaacttccctttcctattctctgctatactgaaagaggaaatgcaaatgctatcacaagttgatataaggatatggagatcacagtattgatgtcattctttactcattaagataatgttttgcaaaagcaattacaatgaccaataaaccagctgcttctatagacatagatcagttcaccaggagtggaactctaaaaggtactctgcaactgagtgaatcacagtgttgagaaaatctaaatgctaggaaatcattgttgaaataaaggttgcttcaagcacatatgaaaatttctgtgttagatggagatgtgcagcacaatcagagataataaaccccatctgttgggtagcagttaaactatatttatatttttaccttaatagcttagtctgcagtagttaacatctggatgtaaatgcagctggtcttgggtgatctatagcagaggtgacattatattgttggtatcaggtgttgtccagctgaagtaggagagtagtggggagacagggaggaggggaactcagctaattattaatcctaaaaattcctcctctatcctctttttaaataaacatttcatcaagctagttacttgaagagaacgtaaagctaaaatacacaagccactatttgcaggcaagggaaaataacatatatctgcatatatatttaattcaagccatggaaatgactaaggatttattttgtagcatgacaggtattgttaaccaaaaaaaaaaaaaaaaaaaaaaagaaaggattattcagcagaaacatagcatccagtgaagccagtagaagccactgaaaagccaagagttcaaatcaggacctgcttgtcgtttgtcacattcaaaagtccaaatgcaaacatgcagagaaaaatttctaaatataaaatgccattctaaaaaatcaactaaaaaaaaagactataccagggtttctgccgcttgcttttcttctcttctcctttcccagggagccctgacttcttgtagtattcgacagagtaggagacatgggttctagctctggatccaggcactgtgtaacctgaggcaagtcattgtaccaccctgactctcagttttctcatttataaaatgagagcatttgcctacgtgtttcgtaaacaacttcagccctgtttaaaaaccatatattctactcagataaaaaacacactggcttgtaagtctggttagaccttgagagcaaggactattgcaccgaggagcactcttcaaactcccaaacttccatttcctttgctgccactgcactgagtcaccattcagggacatggcagggcccgtgtgtgtgtgtgtgtgtgtctgtgtgtgtgtgtgtgtgtgaagtatatgtctgtgtgtgtgttgcaggagaataattaagcaacttgctacataacaatgaaactgcagcaaccacattcaactgaagactcactcccagtgggctacaaaaagacagacagagacgtgatcattttaggggagctggggaatgggactcttggttttttcctagaaatggttctgcttttgctcattacgtttttggtgggaggcgttggcggaagggcaattccctgcaatcagtgtttaagtgaatgtttgtcccagtgtgcgacaccacgctgtcagcaagcagcggggagctgttgagttgttactacatttgatttgactgccagtaggaagcttcatttctaccaactgttagttgctcgctcaaagaatcttctcttcatttttggagtgattttttccctctcttctatttaccattccttgatatgtcggaagcccaaatgccacgtggatttgtaagaggaaaccttagtacttggcccctaagcttgtcagatctgagaatctggatgcaagggatccatgcaatttgttcagtgctcctggtctctcatttagcgtctcctacatctgaagattgcattttaattcagaatctctagaccactccaaggtcaacacaggcatgaagtggttctgccacattgtggccgtgtctttttacatggtggggtttattttagccaacagaacagatatttctgcagcccttattaggtgaaaataagtgttgtcattcacctttttgtgaaattttgttgaaatcagtgctagttttggtgattgcttctggcatttaaaaaaatttttctgatttggtaactttactacatcacatcaaagtccttctccttaaaaataataactttggtaattaggtgtctcaaatagtgcctctgacaacaacttctgacaatgaaaaggatctttgggaaaaaaaacaaaagaatatgcatgggtgaaaagggtgagaaaaaaagaaaaaagaatccctgagagatattatgaaaattcaggctgaatgaaaaagtaattaacactaaacagctaaaactgtaattaagaaaaaaatttcattaagagaaagcaggcgagcctgcttttctaaatatgacaaggtgctgtgtaaaaataaaatagaagcaggtttcagtgagtggagcgggaaagccatgtctttaaccagatcaaattctcgaaattggctgtcaagacaggattgttgtgatttatacccgtctatcaagtgcacgaacgagagacagagagaacagaggcaagctgctgtcgcttccattcgcaaagaacctttaatttccacagcaccatctgttaccaaatctaattcacattcccccttaatctggtttagttccataatactaattcttccccaacctttatgaacacaaaccatacaaaaacaaaacaaaaataaaacaacaaaaaacaaggctttggttctcagtgagtgagaaattgaatattacagagttaagatgttaaggctctggtgacttatgtgaagcaggctctcttccattaaaatgtattcctggtaaggggatttgttttcagccaatgcagagatatgaaattgttcatatttggggtaaaaaaaaaagatgatataaaagtaggccggggacatgaaagcagaggttgtcataaaatacaatttttgtcaagtttagtcactttcagaactggctataaaatcactttgtcatcgctttcatacagagaaaagctgaaattgtatttttggtaaggaaactcgagagagtggtgtatatattcagaaagagtggagaagggttggtggaaaaacctaggagaaatagaaatggaaaacaattatatatatcttaaaatacagagatgcatatgggtaaacacacattaacttccctcaatctaagattctattagcacatccttttgattcgccattgcttctactcttagccaatataataactggcattcgcaataatgagtctgcagaactataaaattagaaagtgctttctgcatcagagaaagattaaactatgctcagtaaagatttagtgttaaatgtattttattgctttccaagtctgtggaaatttgttatctctaaaggcaatagtacataaagatccacaggcatccattacaaaatgcaaaaaaggtaccatgtgaatactggggtgagttttgattacacatttagtcaactggctcactacctaagtttcctatgaccattacaggaattaccgttttgttctctaacccagtattatagaacatcagccaggttacataatatcattcccttactttcagaaataattggagagactgtgatataaaatttgtatttatcacaggcctgattatcatccataaatacatttttatagagaagactttaacatgtaaagtccgtggctgaactggtagtatcttaatacatttttttaaaatccaaaattttgggattttttggatttttaaaaatttggatttcaactattagaggtaataaaagcctgatttttaagagatatgggagattatgaaagaagataaactgttttataacactgaaacaaacaaaaaacttgagacctgaataaatatgcctacacacacaaacatattatctatacactccctataaaaacatcaatggatgtcataaacaaatataactgattaaagattatacagatgaaaaaacataaggtcaataagtaatgtgctaattctgatatctctaaattataatatgtattccataatttttagagttcctatttcagctccaaattaaagaaaattttcagtttttcacacacataagagaggctaaaattcataagaccgacaacaataaatgctgaggaagatgtgcagcaactgaaaatcacatatgttgctgggagggtataaaattggaaaaaaaagtttggaagtttctaataaagttaaatggacaccataacacagcatttccactcctagatattcactacaagtgaaaacatatccccacaaaaagaactgcttaggaatgtgtatcacagctttatttataatataatattagccctaagctgaaaacaaatcaactgtccatcactgatgaacaaataaacaaattatgaaatatatacctgtgtgtggtgtgtgtgtgtgtgtttgcatgtgtgtgtgcttaaacgagtcctagtcaaagataaaaagaaatgaactgtgataaatgcaatgacatggctagatcttaaaaacatcctggccaagtaaaacaagctagatgcaaaagaatatatactgtaaaattctgtgatgttccagaacaaggaaaactaatcatcataatagaaatcacagtggttttctggagcaaggagtgaggattgcctagagaggaacatagggaagctggtggttttatgaattatatgggtcatatttgttaaaccccatctaactgcacagaaaatatgtcttgttgtaaactgtatctaaaaggtaatctaaaaaaaattttaaacaatgggttaaacataataactatgcattaccagaagttttccttgattcctatgccctgtaccagatcgtaaataaccagatctagaatattcttttatcagtgcctacttctacctctcatttacacacaatggactagggaagtgagagaactttaaaggactcccagaattacaggcaaagcccagttcaaagtccagatttccatctcttaggccagctcttttcttaactaaggcctgcagtgaaaaatatttcactgacttgaatgataaaatgcttttcatattctgtttttaaaaacttataaaatccttgcaactgtaaacataacataaatgcatttatgtgtatattttggaagaaaagaaagctaacctgccttcatttgccattttcttccctcaaaatatgtccaataataaaatggctttaggaaatctgcaatgtgtgagtagtcacaatgtgtcagtgtaagccagtcaaggtaggcttaaacattttcttggtttcctttggtttggctttggcaataaggaagtagatgctatagaatatagaataaagaaaaatgcaggatttaggaagtagaaataagaaaaagaggatagtcatttgattttttaaaatatggttaagctataagtatatacatacaaagtagaacgtattagggagaaaaataccacatatgaaacctgactaggtaaaatgatacatttcaaaagaaatgtataatttctaagaggctaccaggtaagaaaacttgcatagcaactggaataaatttaaaaattattttatcaccaatttgccaaatgcttctgatgtagtaacacctagatgactttccttagcaggaaaggaaataaatcatagagcacatttcttgccttctttaactttcacacacacaaaggttacagcatttagtattaaggagaaacgacataattatacagctaattcatgttttcctgaaaaggggtttctgtagaataataaaactgtatatccctgaagacaaatctggccaagttcaccatccatccctttcaatggcttcacacatgctacaggataccaggtcttttaatctgggtgtccagacctggccttccctgagctgacctggccttactcttcaacctcagccttgtatcttaaactatcatgcatcatgtaacaacacgtcagtcaacaacaggtcacaaatacgacactggtcctgtaaaattataatggagctgaaaaattcctatcacttagtgacgtcacagtgaaatgtattactcacatgtttttggtgatgctggtgtaaacaaacacattgcactgccagtcatataaaagtatagcacatataattatgtacagtatgttgtactgataatgataatagattactactttactggtttatgtatttactatactttttaatcattattttagagtgtactccttctacttattaaaaaattttttttaaaaatttacttgtaaaacagcctcaggcaggtccttcaggaggtatttcaggagaaggcattgttgtcataggagatgaaagcttcatgcatgctaccgccctgaagaccttccagtaggactcgatgtggaggtggaaaacagtgatgtggatactcctgaccctgtgtaggcctaggctagtgtatgtgtgtgtgtgtgtgtgtgtgtgtgtgtgtgtgtctagattttaacaaaagagtttaacaagtaaaaaaaaaatctgaaaaatagaaaaaaccttatagagtaagaatattaagaaaaaaagtacaactgtacatgtttgtgttcaaagctaagtgttatgataaaaagagtcaaaaagttgtttaacattttagcagtttatataaaatcaaaaagttacagtaagctagggctaatttaccagtgaacaaagaaaatttttaaataaatgtactgtcacctaagtgtagagtgtttataaagtctacagtaggatacagtaatgtcctaggccttcacattcactcaccatttactcactgactcacccagggcaatttccagccctgtaagctccagtcatgctcagtgtcctctaaaagtgtaccattttttatcctttttactatatttttactgtaccttatgtagatacacaaatacttaccattatgtaacaattgcctacattattcagcacagaaacatgctgtacacatttgtagcctctaggttatatgacatagcctaggtgtgtagggggctatatgatctaggttggtgtaaatacactcttggatgttcacgtaaggaaactgcctaacaagaaatttcccagaacatatccttgttgataagtaacacatggctgtatacatgcaatgcttaacgctttgtaagtccccatgctaatcagcttttcacactgcttttccttctctctggaattcaacttccttgcccttggcaacactttctgcgcaacttctattcatcagtaaaagtacaattcggttattatttcctcagcaagtctttcctggcactccttcctttaggctcataatactatgagcctatttctataattacagttaacatctttttttgtgtgtgtaatttaaaattttttggtgtgtgtaattaaaaaaattttttatgtgtgtaattaaagaaaaatagggatggggtcttgcgatgttggccaggttggtcttgaactcttggcctcaagcaatcctcttgtcttggcctcccaaagtgcaaggattagaggcatgagtcaccacatccagttttaacatcctttttaatgtgcagttgtccctcagtatccatgggggattcattctaggacccccgtcagataccaaagtctacagatgctcaagtcccatatataaattgatgtagtatttgaatacaacctatgcacatcttcccatatactttaaatcatctctggattattcgtaatacctaatacaacgtaaatgctacgtaaatagttgttatactgtattgtttagggaataatggcaattaaaaagtctgtacatgttcagtgcagatacaatcatactttttttctaatattttttatctgcagttggtcaaatccacagatgcagagcccacagacatggagaaatgactgtacaaacttatgtttccatccttcctctatgaattaattgttttatacttctatttaaccctgttcctgggttgttgagtaaatgaacaaaccatgaattcacacacaaaaaaagttgtggactttaaatgttggatcacacatttcctaaataaaagtgttgttcatacaatctcaagaatctgtgaaataaagcattaagcatagaaaaacaattttgtggaagacaaaacaaaacaaaacccaaaaacctgctgtgtgaagtagtaaaatgattataagatttttaactggaaggcctggttttgagttcaccagcactgtcatttgctaaaggtaaactctgacatggtatctacaagacttggttgctaaagctgttaaatggaaggtatatctcattgtgaatgttaagaagattaaataaaaattatttgcattaaatcagaaggatatcattgagcaaggaagaaaaataccattttagggtgaaggaggatgatccccaaagtgagaaagcagggagtagtctcagagaatgtaggagggggtggtgctgaagaatactgtaggggatatggaatcagaaatgggttcagaagtccattggggccagattgcagaagatttgaaatatcacactacctagattagatgtcactttgtaggtaatgggaagctactgaaggtaactaaggagaaaaaagaaatcagccagtttgtgtttcttttcttttttctttttcttatcttttcttttttattttattttattttatttttttgacacagtctcgatctgtcacccaggctggagtgcagtggcgtgatcagagcttactgaagcctcttgaccttctgggctcaagtgatcctcctgcctcagccccgagtaccagggattacaggtgcgtgccaccacacctggctaatttttcttttttaaatagagacaggattttgccatattgcccaggctggtcctgaactcctggactcaagtaatccacccacctcggtctctcccaaagtgttgggattacaggcatgagccactgcacctggcccattttttgtttctgttaaacactgttttggctccagcattttccatgtattcactcattcattcctatcatgttttaagcctataacctggtaaacaaaacagaccacatctttgaactcggtgtttacagcccaactatgaagctattatattatcttcatttataatgaagataaatcatgaggaaaaggcctgaactaagatggtggaaaagagaatgaaaagaaaggagatgaatattatgggaatcatcggaggaggtttttgcactcctagtattctacaaataatatataataattagtcaagctacaatttctttgacaaagtacgatttttaatatattatataatataaaaacaaattaatgctttgtcatggagctgatcattttcttgaactgtggaagtggttacaaaaatctcatatgtgataaaattatgtagaactaaacacacacacacacacacaaatgaatatgagtaaaactggtgctatctgagaagtccatgaactgcaattacctggttgtaatattatacaatagttatgcaaatagttacaactgaaggaaactgggtaaacaggattttatgatttcatacaacttcatgtgagtctataattatctcaaaataaaaagttttttaattaacattttccttgagggctagactatagatcatatttgactttgtatccccagtacttcatgttatgctgagttcatgtcagctacttaataaatgtgtcacttaagagacgtttgttgaataagtaaatgaatgaattacaaagcatcacatcaaataaacacatcatctctgtttactaatgttatgaacctgatcttatgagtttctatgtctgaaatatatgtttatggcattagtttaaataatagaatcatgagtatctgattctagataccatgaagtcaagatcatgaagatttcaccagtgtgaaaaggtggttagcatggggactcacaaagcattaagcattgcatgtatacagccatgtgttatttatcaacaaggatatgttctgggaaagttactgttaggcaatttccttatgagaacatcctaaagtgtatttacaccaacctagatcgttgaagatgctggcatagatgcttggatgattctctcttctgccaccacatctcacagtgtatggtgaattctcaaaataatgttcttaagaaatactgatataattttatatgtcccaaaaagatatatggaaagtttgttctttttcttttctctgagggaaaaaaattacaaccctactggttctcaagacaaccttgtaagatgagtgttatctccattttacagatgaggaaagaaagctgtagttgaaccagaaacaaacttaaattttctgttgaaatccttcactctgcactacaaaatgctgtacctcaaagatttaatatcaatattttatagcagccaacttaatatgtcaactgtagacatacgtatgtttaacactttaatcttctaaagatttttttattctttaattttcttaaacaactgtatactcagtaagtgccatgatgtacctgtcttgactatttgaccccaaaataacaaaactgtgaccaaattaaaataaaaacaaaaaaggtaacttagtccttcataaatgcccaagaacaaagaataatagtgttgaaaagtcaaaattacagagcaacttaaaaaatactaagattatttatatcataggataataaaacatactaagattatttatatcatagttactccctaattggtacagaattagagtcttctaataaggagaagctgacttatttcacaccatggaaaactggagctagatattagaacttcctggccaaatagttgctgtcattaattaactgtattaaaatgtataattaatataaattaattaactcactgtgcctcagtcatctgttaaataaaatggggtactaatacctatcctatctaatgtacagaaatgttgagactcacaagataaaataggtatcaaatcttttgaaaagcttaaagcattatgcaaaattaaagtactactacaaatttgtagaataaaatatctttttttttttttgagacagagtctcactctgttgcccgggccagagtgcagtggcatgatcctggctcactgcaacatccacctcccgggttcaagtgattctcatgcctcagcctcccaactagctgggactacaggcgtgcaccaccatgcctggctaatttttgtatttttagtagagacagggtttctccatgttggccaggctgatctcaaactcctgacctcaagtgatccacccgccttggcctcccaaagtgctggaattacaagcgtgagccactgcacctggccccaaatatcatgtttaatttttggaataatcaagtattaaaatctgcatctgattttgtaatacaaatccaaacttacctggaatactcacaaaaagttattcaatttgtgagatttgttgtgatttgtgtttgtttaagcactttagtaatgtagtctgagttttaccaatctttcatcaatttacacaatgttataccaaatgatttccttaattctcagtacctgagattaagaggttatgctaggtgtttatagcagttttaattcagtcaacacacagatcttctatgagtatctttgaagcacaaggcatggtgctagctgtgataatgaggtctttttccaaaggaaaatgtggtgaatttcagggaaggtcaaaatagccatgctaagaattaaggttgtgtggaagttatgcaagaaactaacgaggttagagccctccatcagattccatgtggataacaattaatttaacacaggtcaggggaaaatgtggagacaacttctaaaactgcttagctacattcaaccatcttagccactaaacacaaggaaaataagacaagatcaagatagtgtgaaacctatctgtcactacttctggaaataaaaatgactactatgaataaaggcatagtctcaaccaagagccatggaaacttctctgtggagttcctttaacaatccacggtatgaacacttctcagcctcagtagctgctggccacaccctagagacttaagcccctgtcccctccgtttgcccctaagatgttgacagttcatctgttcagtttccagaagggaattagacatggcagggatatttattgttcttatccaatgctcagtaggaattattgagggaaaacgggaaaggaaaaattagtgcaatccatctcatgaaacacttggccaatgttacatattagctaactagttagatgtataagattgcaagttttggcggggcgcggtggctcacgcctgtaatcccagcactttgggaggccgaggcaggtggatcacgaagtcaggagatcgagaccatcctggctaacatggtgaaaccctgtctgtactaaaaatacaaaaaaaattatccgggcgtggtggggggcgcctgtagtcccagctactcgggaagctgaagcaggagaacggcgtgaacccgggaggcggagcttgcagtgagccgagatcacgccactgcactccagcctgggcgactgagcaagactcagtctcaaaaaaaaaaaaaaaaaaaaaaatttgcaagtttcctcctggagcacataggtccccatgcaaactctgctcataactaagcctctttttttatgggaaaatcacaaaccaaacagtaagcaacggtgagtatagaggcattaacttttcagattaaaaaaacaatatgatggtttcgatagtaagaaataaactaacggggtgtcagagaaagaaatggaaatgaagtaaggagtttggtttcatcacttcagaaacctctatcgaagagatgcctctctccagtgtctaaggaaccaaagcgtctgtgcctcaggtaactgagctttaggaaaaacaatctcttgaaaaatggcgactttcatcctagcctacgcccacatgtacatatttctctccactctccaaattttggctgacagattagccagttcaggttataatgctgactgatgttgtgaactttattcattcatctatctttctatccctggaacctcacgaggctgagggctgcgtgctgaggccatcgccagcacgtacataaggtcatctgcttatttacctgcattgctgtatcaaatatgctgtcacatttaaactatagagctactaaaatatctgccacaagaaaacaaataatgatagccaaatgatggtgtgtgattggttgattgtactgagtacagggggttgttacctagtagttttattaaatatgaaagcaaaagatttatattatgggtgataagggcaagaatgctgtaaaagtgagaaaatatggcaacagtgtgctgtacatcaccaatgggataactatttatctaaaaagttggcattcttagacttccaacatgcagtgtatgaaattcatatattcaaaggagacatcataataacctgccggctggtaatgatggatatgtttttaaaccaaatgaccacaatcttcagtctacctgtcatggagggccagaaaaaaatggaattttcttttcataactcttgatgttgaaagaggaaaaacctggaagaatgataagtggctcattccaatggacaaatggacatggagctgagagaatgggtgtgaataagtcattgttccttaactaatgccattttcacttgttacactgaaaaaaaaaatggaacgagggatgatttctgcccccttcatgtctaaaatgcaggagttcaaactgcaacaaaagctggaaaaccttcaacaccatgtgagttaatttacaaattacctcttgctgaaaaagtcagggagaggctggcataatatttgtctattaactaaaacttattgtacaaacacagcaagaagagtgatgctgtagagctttattgactagaaagcctcgcctatggatttcctcctttgaggtttaaaggaattcctatttctcatttacagtctatcagaaaaggtatatgacctgcattttttaatttatataaatccactcagtcaatcagcctgggctgaaatttaatggatgtatcagtcatcgttggtccagagagagagaacgaagcaccaacatctactacctcatctccgctgcttctattatactccccgcagccccgcacctttttttttttaacctcactagcttagatacctcgcttaactattaagcggggagtcttgcaaagttgttgcttttaaagagggaagtctgagtaaaaatgagctgatggaaatataggaagactctggctattttcacttttaaaaaacttcattttcccacctgtatcatggcaatattatcacacattcagcaaatatacagtagcaagatgtttccgtgacaaattaagtactttctaagcattttatcagataaataaaacatcaccacaggatgataaaatcagctcattcagttgatttaacctgtccttcaagaaactcacctgaaatagattaaggaccacctctcagacacacacatacacaaacacacacacttacgcactcatttgctcactcttaaacatataagctggactctcgtactactggtaacaaggttcgtaaaggcctcctaacatcagagccagatagtactgtttactggattagtatgaaagatggtattcctatgcatttcaaaagataggagaaactgaagatgagaacctcttcaaatatctttaatctcagtgtaatctgctagagtctacactttctcctttagtacccttagtaggtgacttatagttttattttgacatttcctttaatatcagaaaatattatattttcatagtcgtattcttaccctaacactctaggcagagaagaaaccagtgagtggttaggtttctgtctttactttgctttccccctttgctaatttcagaaagtgaatccagcaattataagtagtgtgaggctgataaggagtcacacatgcaaaagaaataggttcaattcaagcttccctgactaatccttattatgactcatttcgacttcagaatttgtcggttgaggtaagaagctaatttggctttgagaagtaaaatctcagttttgtactttccttctagtgctattaacaaccccattattaagagcaagtttgcggagtttggggggggtatgaaatatttattgagtgcctgcttttgccaagcattttttgcatgctattttatgaaatcgctagacttaacatcctttaagcagtagcataaatttctctggctttcaaactcatagtctgcaccacactatcttgcttcccaaaataaagtgcattatttttaaaacctgcacccaatatcatccttactgtatgaccctgagattaacagtctgacattctgtgagatcctgtcaggaaacggtagcagaaaggacctgatagatttctcttaactgcttcgttcctctatgcacagatgctgctccttctgtttgcattcatcagcagacctgtctcctctctcgccaggggttctctcctgcaaatacaactaggttttaatctatatgttttaagaaaacaaaggaatctggcattatgcctggaccagctgtgacatcccaaaacaaaagatcaccaggccatgctgactgtcttcagtgcttaagtaaataccaccctatttattagccttgctttggggaaaccccaaatggtcaccttacctcctgacttatgaatccataaaaatgcccatgatttattattgcatctcccttcttccctatgaatttgataatgaagttctttatgggaggctattaagaagcaacatggatgctactatttgctacttatcccatataattaaaaacaccataactgctattagagagcagtatttaaagtagccagactatcataaatatggctgatttgactaaactgtcaatggcaaatttcaagaagaaccactaaaaggagatttacttttgaaatatatattacaaaaaggcttttattcacatttgttttatttatgttttggttctaatgaaatcactagacttaccaatttgctagataattataaagtcagaattcttaaaagcaagtagttatcgctaattaattttcttctgggtatctccttgacaaattataatatctcccttttaaaatttcttacatatagttagaccatagctttctttaaaaggtgacatttattcctttaaataacacctttgatgaaaacgctgatcaaataaaaataaaattaacatccagattatagattctctagtcttatgagagagggtgaagaaagaaatctataagaggccaaaaagagacattcacagccagtaggctgtgctgattcatgctcatttactaagtttcagttcccattttatgaaaataaacccactctagacttcccccaacaaaacaaatacatgttttatgtgatcttaggataaagtaagttattagatattacaggcaagccaggtgtggtggctcatgcctgtaatccctgcactttgggaggccgagatgggtggatcacttgaggtcaggagttcgagaccagcctggccaacatggcaaaaccccatctttactaaaaatacaaaaaaaaaaaaaagaaaattagccaggcatggtggcatatgcctgtaatcccagctactcgagaagctgaggcagcagaatcgcttgaacccagggaagcggggttgcagtgagccgagatcacgccactgcactccagcctgggaaacagagcaagactctgcctcaaaaaaaaaaaaaaaaaaagatattccaggcaaagttgactcaagcacatgagttggtgaaatcatgtacatgtgaattattctagtattctagtcctgtccatattcgatcagagaaattctaataccctaacagcagaataaaaaaggaaagaaaagagtgctcaggaggattcttgccagtatatcttaaattttaaaaaaataataataaatcagcactgtgagttgtggtgaatacaaaccaatcaaggcaatgagaaaaaagcttaagtattcttgtatagatgcagttaaaagattttttaaacatttaattactttgtttatctaaggagtctcaagatatctatagaagttccctgaagttgtcaaataaatactgagccaactactgttcttgcagttaaccaacaactaacatgtgcaggggtgtccaagcttttggctttcctgggtcacataggaaaaagaattgtcttgggccacatatgaaatacactaacactatgataactgatgatctttaaaaaaaaatcacacataaaaatcttataatgttttaagaaagtttactcatctgtgttgggccgcattcaaagccgtcctgggccatatgttggaaaagcttgataaaggttacctttaattaagttttgtctctgtcaactttgtccttctttgcctgtctagagtagcaaacagtgttccagtgactctgtgagaagtagcctgattttcaggaaaaggtaatttaagaataagtgaaggtctttgttactaattctgtataaatgtaattttttttttgcttttttttttaagtgcaaggaaaaaatagacaatggctttttttaatggcatgttttcaaagctggatagatgtgtgtgtgtgtgtgtgtgtgtgtatgtttgtgtgtgtatgtttctgtgtgtttgtgtgtgtgcaggagtgggatttttgttgaatgtgggggtgggaagagagagagctgggatgccaaaggaggaagtgtagagccaaaaaagaatgggtgaatgggggataaacttcagtcttgcctaactcacctgaattttattgacggcccttaaattttacagagttgcttgatgtaaggaaaatatctcattttatttggtgctggaaaatggttttaaatgcaggtaaaaaggaatcaatcacctcaaagactttttgggaaaaggctgggtataaataaattttcttgaagtaaaaagtattgaaaaaatataaaaaggattactggttaccttttgagttagcaatgtgattcattttcatgtgtgttccgttccccatatagaccttgcttatttaaatgaaggctagcacttcactggctcaaaaaaagcagatcttttaaatttactttggaactgaattgagtcaagtgggatactgttaactaaccctaaacatctagtaaattcggctgggcgcggtggctcacgcttgtaatcccaacactttggaaggccgaggcgggtggatcacctgaggtcaggcgttcaagaccagcctggccaacatggtgaaaccctatctctactaaaaatacaaaaaaatttagctaggcatggtggtgggcacctgtaatcccagctagttgggagactgaggcaggagaatcgtttgaacccaggaggcagaggttgcagtgagccaagatcatgccattgcactccagcctgggagacaagagcaaaactctgtctctctccaaaataagaggaagaaggagaagaaaaaaagatctagtaaattctaaagtgtaaaacatcacatgcctttctgtacatatggagccagaggaaatattaaaaaaaaattctcttttcatgactttatcataggtactcagttaacaaataagatataataagatataatcactagatataacatataatattatccacacgtatatgtctatgttaatctataatgtaaaaattggaggagtagattttttttaaatcataatttaaataaaaccccctacccacagcccaaaatgatactgtgttctgaatgattctgaggaagaaaaataggaaaatttgattcaagtctggaagctaccaattccattcacagttctaaactttgatttacaatttataatcatttttatataaattagctcttcctagtccacaatgacactacagctttgtaaacttatcttgttagatacaaaagataccagtaagtctttaaaaatagtatgtttaaactttcctgattgcaacagtgtctatttcagtataaatgacttgtttgactctagtttacaatcgctttaagtatttcttttttgggctaatcaagtaggtacctgtccatgtggtttatctaggcacaaaacacacagttacatagagatttacacgttttaagactttcatttaatagttagtatatattaatatatatgcaaaatccaaaacaatgctttgtacatggtagccaactaaaatattctgaatggccacataaacgaatataattgacatagaaattattttctatttttttatatctagtaaggaaaaaaaggacacaatctgtgtaaattattcactaaaaagtcaaatgtgttatccccactataaaaaaatctgtttccaaaaggacacacagttgttttattttgctaaatcaatacccaaaaatattacttttcttcagttacacttccgttgaaagtcccaaagattccctacctggaattgcccatatttgaagtgcaaaacaggctgagcattatctaaatctagataaaactcattggtttgtaatctgcacaatgatctatacatctaaatctatatgcaaatcgaatgctttcatgcattaaagcattccaaagcacccaggaccaagggagcagcaggttctttcagatccttcccctgttactcttcttctttccttctatttatttatactagctacctaaataattcacactgcctgcttttcagcccgaatgttcctcagaagaggcctacaatgagctattgcagtcaccagatggactcatgaatgcagcaggtggggcagatggcaaggcgccctgtctgatgctgcctgcctgggcatggactgccttttccttccaggtacattatcatcatcctaacactgagcggtgtgtagtttgggggtggggtggaagtggggcattggcaaatcctttacatgcaatactagagaaatcataaattaccagctgccctcttcctcctcgtcccccacccccagcaacccctgatgtttcatgttgttgctttgttagtgagtttgtcttttttaagactacggtgaaggtttccgaagcattctggcactatacatgacgaagaatgcatccattttaaacagtccacctcagctttaaaaagtgaagagaattcaaagggagtgatatgggaaaactcagaaagactatggcgggggtggggggctggataaagcatgttcacaaatattttgcaaaaaaacccacaaacgaagcaaaaacataggtgagatgactcagctcatgtctgcagtgcttacataaaggtcctttgcatatatggagtggaaaagataaaaaccatatgtttacagccttttgatgttgcagaaaatgctggctgtgcccacgttgcaatagttctttgtctgatatttctggtgtcatttctaaaagtgtggcatttcccttccaaagtttgcaatcctgtaatactataacacacaaaaaaactgcattgcatatcacttgcaattggaaacttacaacatcatgatgccaagctatcctgagacaagcactcagtaacatgtagtataaattttaattgagcataaacacttgacaaaaactctctcgagatatttctggcatattccgattggcaatggtgccctgataccatgattttaatccttctataaacttaactgatgccaatataaatcttattacctaacttcactaatcatctaattaaaaacatctaaaaatgtgaaagacaataattttaatgacctggagcaaaccaatctgtatcttcaaaaataaataaataaaactcctaaataaaatgcatccactgaagagatgctgcaaacagagaactgctttgaattcaatctttgagtcctcaggcaaattgaaatcccaggcttttgggaactaccaggcagtgttgcaggaatgctggacaaagacaatagctgtgagattatctcaagattaagggcaaggttttcttataaaaactacttttcaatagtcatttactttgattggaatgagtttactaattcaaacctttccctcaaagtcaaacaacataaaccttctagagttcaaacaaatccttcttaccttctctgctacctgggaaatatactgtcttacatgatctttaaaagcatttttttttcttttcattaatcagtctaaaaaaatcaaaccatatacaagtaacgttgagcattttaagatttaatggcaactttggtgatcaagtcttcacaaagaaaaataatcgggcccaccttttagctgaaggaacacaggccagatcagacttgactgctccaagaccccaatcacattctcgccacattcaggatctaaatgcacaattcctaattacattcatgatgggaactttacatcagttctaaaaagccaaaaccagaaagttagggtgaaagttgcaatttgctgaagttttatgtaaaactacagctacttaagtcctgaatttattttatgaagactgactcctttttacattggagacttaggtatgaaaaatcccatttttaaatgttttacatgcattcacatatttttatcattcatttcaagatcttagtgcttaagacagtgtctccacatagccaaatacttttgaatgatcaagaaaatgcagttcaatgcactaaattgagagctttaatgattttaaaaactgcaaaagaacacatgtaatattttttgatgcaatgtgagactataagcaattaatttgacaccagagagttggttatatggaatacacttcaaaatcaattttaaactgatattttctgattttattaactatcattaagctatgtacccataacctaattactgtacataatggaggatacttaaaaatactaaacagaagagaataaacatttcttaagaaaaaatacactggaaggcaagtggtgttagattaattttttaagatagcaactgtggaatggaaacaatttttagaatttatgtagttcataatgatttgaatattcttggtatattcaacgtgtgttaagacagtcgtaattaaactggtaggcaatattacttctaaaataaaattagtagcaaagtctcagaaaaaaaagccatttaaaaaaataaaagaataagtataaataaagaatgaagaaactagtatgtaattacaatttaagcctggaatataaaagataataaaagtaatatatattaccaagatgctactgaaagagaattataaacaaaattttaattttttacatttcaatagtattcttttagttaagtttacattatattcacaaatagatccaccttatataaatgtctacatttggacacatttttggagtgttagaaatcagtgtaatgacagtggtcattggagaaatgcaaaccaaaaccaaaacgagataccatctcacgccagctacaatggtgagcattaaaaagtcaggaaacagcagatgctggagaggatgtggagaaataggaacgcttttacactgttgatgagagtgtaaattagttcaaccactgtggaagacaatgtggtgattcctcgaggatgtagaactagaaataccatttgacccagcaatcccattactgggtatatactcaaaggattataaatcattctattataaagacacatgcacacgtatgtttattgcagccctgttcacaatagcaaagacttggaaccaacccaaatgcccttcaatgatagactggataaagaaaatgtggcacatatacaccacggaatactgtgaagccataaaaaaaggatgagttcacatcctttgcaggaacgtggatgaagctggaaaccatcattctcagcaaactaacacaggaacagaaaaccaaacactgcatgttctcactcacaagtgggagtcaaacaataagaacacatggacacagggaggggaacaacacacactggggcctgcaggagagtggggggctaagggagggatagcattaggagaaatgtctaatgtagatgacgggttgataggtgcagcaaaccaccatggctcatgtatacctatgtaacaaaactgcaagttctgcacatgtatcccagaacttaaagtataatttaaaaaaaagaaatcagtgtaatgacaatacatatacatgcaaaaagcttacatttgcatgtgttcaaagaagagttatgtgtatgtacatgtgtgtacagatatatatgtgtatgtgtgtgtgtgtgtatatatatatatatatattcaatttctctaattaattaaattgttattttcttatttcagaccttttcctggatatggccaagtctgaagtttcaaaatacatgttattctgaacctaataaagaaaacatatatccaacctttaatctaatatatactagaattagtttaatttaaaaagagaaacatacttttaaatgccccccttctttttgccaaacaaaatattcacaaagtgactcaaatgccatgattcaatgcaatgatccattttctgaattcatacagacccctttattaactatgatttttttgccagcttttttttcctatgtaggtagtgctgatttaaaaaaaaaaattggagggagtatgtatactctctaatgaaattactgattgtacttatttgtggtttgccgaccttggtgaaaatataaattaagtcacataattaaacacacaaaaaaatcttagaataaacgaaacaataattttttttagagctggaaaatacaacacaccaaatttgtaaataaggacagtgtctttgcaatattaacctgtaatcctggttcaggatttacctaatttttgttttattttgcttttctcttctgagagtcttagaagaattttctgcatgtgttttgagtttatagttttaaaaaaagagaaaatgagtgcatgctccctcgcatgccttctctgcacctaaacagagccatttacatagcccattgaacactgtttagtaaacaaggcgggtacaagtccagagtggcttctatcttccagtcctgccgtctttttaaaaaacaaggcaggggttctgtttttagtacacacttcggttcagtgttaatcctgttttatgttgttcacacctgctgctgactagcagcctgctgatgggctggggctcacgctgctcagagaaatcccactaaaactaacgaagaagctggacaaaagctactgtacagagctggaaacaaagcctgcccagggtccagaagacaagagaaacaaccccacaaaatctttcctgtcatttgcagataaggctccaatgtcccaagtttgcctgccactaaacaaaaaaaggcaaccaattgctttttttgaaaagtctgaccaccattgggttatttacattcctgagctttttatgtcttttggtaaaattgatgcaaatagtttttaaaaatgctgttgtaatcaggtgtacatgtgagtcactactttgagtccttagcaaaagaatctgtacttaaacataattattcatttgaaatactccatggctaacctttctactcatggaattttgcatccaaagtgaacagagaataaatatattctgccattggtgtccatggtgtggccaggacagtgacttgtgtactaagactgctctcttcccaccgcccccaccccgctgcactgcatgcgcctaatagcaaacatcaaaaggaatgatttcttttttgatcttagtaccagcgataaatcaaattcagtgccacagacaggggggaaatgcactactaagggaaaactccaagactgacagtgggaccaggcagaggcattcgctcaatcaagtttcagtaaacgatgcccacccttctcgttgaaacaagatgtaagctgtcgtgcatttacccagaatgagaaaaacgtactgagtcctgacgtgaccctaagttaagaagcactttgtgctgacatttctagtggtggcatcagagcccctccctcctacctatcgaccgagccaatttccttcctatctgggagccaggttctgccgcaggtgggcaaggaaagctcctattggccactgcaggacagctccaataggagctgcacatctgggggtcaaatggtggctctgggatcattttattacaactcctggggcacctttcctgactgcaatagccaataaagcatcctcggctccactgccaactcggggagttctgcagctgcccacaccacagcggtgcacagatttcatggagcacagttttaatacttctctgggggaaatacaaaaagcactaactagcatattaaggttctcttaacgaatgaatgtgaggatgaaatatttgaggtgttggtatcttttccccaatttgttttgaaaccctttacccttagcaatgtgctcttcctaggtcactactgtgttctaataggaggtttctctggcatttgtgacatggtcttcctcagcagatgcaaattttacatggattctcaaaagaagctaagcaaccgcagaagacatatcagataaatgtaaactttttcagtgtgtacaatactttatacttggcagctctgtaatgatgttagagaaaaaaagttgctaaaaatgatattataatatacttggtataattgtagatagaattcatgtgtctcccatcatctgtgacagcccatcagaaaaataattttaaaaaagttgttgctttcaatttgattatggaatatgaatggtagagaaataaattcaattattgtgttgaatcatatgaaattactgatacttgaccattgtttgacctacaaaaatggcaacttcacatgattctttctaatataattagaattctattaccttgctttcattcaaaaaagtctgatgtttcatcaaggaattttatgatttcaaatttgaccttcctattcctttttccctcagaaagccacatcaattttttaattaatatcaaaatgagagaacttatctaagtttattttaagactggaacctattaaagtcttgggtacataggccctagtggtaaacatttcatgtgaaatgaagttttttgcatgtaagaacatttacgtattcaatggagtgtttactatatggtccccctttggtgaagccacttagcaatgctatataacggaagagcaaatgcttcattccaagtgccaagactgcacaataatggaatatgatagaaaatcttatccttgaggtccttggctaaaggatttgagacatggataattttttttccagcgactttctaagtttactcaggacaaaaagatttcagtgtatcagcagtagtggcggttttcagatgaaatgatatttagtgttttgcatgtagtattggcgacgtgatgaataccctcagatgagaaggagaaaaatataagcagctgtgcgctttatcaaggtgcgctacctgctgctgcctcccagcactgctgctaagcttgcccacttctgaagaaagtgaagaccaccttattttgattatagtgctttcctcgggcaggaatttttatttccgttgaatcttaaaccattacatttccagtgatgcatttttatgtttacaattgacatcttcataaaagaatgaaacctttgagcaacagcttaaaagcatgaaggttgcctgcagtaagtacttaaattattttacacctaaatggagcccagttgtttttagtgaaaatttaataaaccttaaactgatgacctttcttccacagaaaggtcccaagttgcaaaaacgaactttccaatgaaatatattttaaggaactagtactgaacaaagggctatttaaagctgaacgctttgtcaatttatcagcttgtgaacattctgttcctgaattccccactgctgctgaatgtatagaacggtggtgccttgcttaatcgaatactattgatttgagtgtgtcacagtgatctcattgagagtaatcaatagtaatccaaaatcaatcaatttgctcttgcactatcacttatcaaatctgaatacgccaaattatttgtaggcgtcaaattacaaagaagagaaaatggcagaactgggagagttaatggtttgtattgaagaaaaaaaccaatatctcttttttcaaagggaggtgctttaagatggactattacttggacaaatacatttatcttctcattaaagaatcctaactttataattaatctcattcctttcttgaaaaaaaaaaaaaaaagatttctcctgtaggagtttgctcgttcagcacaactcacagatgccctaacttatttaaccagagcacactagcattttacaagtctgatcagctaagtttcaaatacctgtaacccatctgctgaaaaaagagggagactggattgacatagggcataactgcatcttctaacatcagaaatgatgtttaatagaattggagtggagaaaggagtacttaatttctccagagaatgtacagcagagacgcacctgcttatcaaagaagctgctgttgatgctgaagtttcttttatcaacatattcacctgtaatttcatcaaggtaataaatccctctattcataacagcacactcaaaagcacccctcctatttaacttgaatgaaaaaaggcacagagtgtctaaaacatttacttttgctaatgtaacagtgttggcattttacttcattcctgataagctggtgccagtagaagtgattattcttttcttattcaaagcctatcagcatttcgaaaagctctctcagtcttatcaggtgtatgaacagcacagttaactgaaaacagtttgtactgctcctctctctttctgccaagctatctgataaacccccaactaactaactgtatttacacacaatcaaacataagttgtatcttctatgcactatagccagattccagtttaccataggtttttctgctgtaacattaacttagcaaaaatgtcagcctccagtatcccaaactgacaacaatcaagaaaacactataaaagcactcaactagaatgcactacaaacagaaacaaaaagaaaaacaaatataaaaagttgaaggcaatctctttggaattcagagggaaaatcaggtgtactctgtatgcaaatatgggtgaatatcatgcacttaccttttaccaaagtaaatgaccctttaataaaacagatgaatagaaacagaaattgtaaaggaaaatactgccgggatagaggaagggaaggtgtttaggaaagtgttttagaacttagcaggcattccccccacacttcaggttatctcaatgtggcagcagagaagttctataatgtaagcaaaggaagacaatagacaatatcaccgaacttaccccagaaactgaagacaagatagaaagcaaggctgtcacatatggtgaccacattctcaggatagattttccaatcattaaaaccctcataaatgctctagacattaaagttttgttcactataagaaaataaagaaataaaaaaatacaatttgagtttttaacctcttattatttgtcttattcttcagacttaaccaactgaatagttcaatataaagacatgaaaaaagaatcatcattcacattaatgtaaatagatgatctgttctccatttctatctattaaaaaatgcttaaactaggtcatggctcatacgaattgaaagacacacctaatcatttacgggtagtactttggagcatgaaagataacaatgacatttctagagcataagagaaatcggaaatctacttgaatgactgagtaacaacaaattcctgaccctaggaaagaatctctgcctgagcttctgtgcataaattgtccatttgttcctcacctccctttgctgaatgactacgagagaacagaaaaaggcggccacatgctcccacctgagcccaactcctgatgctgtctagactccaagaacagaatgagccttcctttagatgtgtagagcaataagatgaattagccaagtgtgtagttcagtacaattcagctgatagttgcttttccatctgtgacactatgatcccatgactgatgaggcaggtctcattcaagtctatggataaaagggatgtttccgtcatttcataggacccagcaccaactgtatacagtcactttctcataggaaaaagacatggttctcaccaaccatatacatctttccctttctttggtcatgaacagttggttacgggtatgatattcctcctcaaaatatctgatctgttttaatggattaatggctgaaaagaaattaaaaattatcagaatattcttttatttatgtgaaaatgaatacaatttaacatgcccatcttacatttttggagaagttaatgtactaggataatttggaattatggagggcaaagggcaatcaattgaacaacctcacagtttattttttttctctttaatgagtacctcagtctataattttttatatgacctgttattttggttaattttggatgcagttctggatatatgactaatatgcatttactattattttcaaagcaacataagttcttataaatattgttacataataactgccttgaaaagtatccttttaagatattttaactcacattgtgagtatgaaaaaaatacatatttctttaatgaatcctttgttcaaattctcaaaagccatgaaaaatgagtaaaatctttctagagtagatgaaaaaggaattatcatttacaaaggtattgttgtgatcatggaaaaaaagaatttagtgtgcttctgcctattttctgtacataagttcttaatttatattttaattttcttttgtttttgcatattgaatatgccatacaaaaagaaagcgtaagatttttttgttttccagaaaacatatgcaaagtgcaacaaaaagaggtgtcccctgataaaggtggattgtccgtgttcctttggattctccacttcttcaagtttttatttacttcataaataagagccactgaggttcaccacttcagagacttttgtctttctaaacctattttactttcaaggtagtagaaaaatttgaatgaacctaatttatttttttcttggaaacttattgctatctatgctatctgtattcctacagttcatttttaaagataagtaagcaagcaagctgttttttcattacatttatactagccatcaatctgatatgagaatttattggtagcttcccttttatttagtaccatcttagccaactgtttgcagaaaaggtgtataatgaagcaaagttaaattgacatgtctgtgatatgcctgacagccctcagtatgcccaatattaatttgttttctttggctaggtaagtcctgccaaagcatattacacataatgtgtacttccaaccaaaatgatgaaaagtatatatgaaattttgtttcactcaaagaaaaatgagaagtcacagaggaatatatatgacaaagactgttttttataattaaaatataaatgtacttttcagttcttcttttagaatttaatctaatctgaagtaggctccctgtaagttttggcaatttaataggtatttaaaattttttaaatgccaaaaccaagtgttttccttttctatattgtttgaaagaattccatatagccataggttgtatttctaattgttagtgttgcgtggtttatagctacattcaaatgcacatatagatctttgccagtatactgaaatggactttaactgaccagaaggaagccaatttctttaaaactgtaccttttctttcattgttttgcctcagtaagttaccttccaagtatacatgcattgtcataaattaaaatgacatatcatttgaagaaatcaaaacatcaaaagcaagtttccctcaaacatttaaaattatttttaaacattataaggggaaatttgtgtatatacacacatatatacaacactcaataaatctaaactctctcaattcaatagttttggataattgagtggaagatacttttggaaaatcctggataattgattagaaaacacatttggaaaatactgagaaatattgtccaaatcataggacaagaaacatgtgtcacttctggaaagaaaaagtagagtggagagatgtgtgtgctaaaactctgaatggaaattattttattagcttaggtttcctagaccttacaaagtacaagactaaaaatgaacttgaaacaagaataaaaggccaggtaaatccttcaaaaggctgtcatttcccaccctcagataataaaggagctaactttgatctgatagattggcataaagaagcggttagcagaatttttttaaaaacacaatagcagtaaatttgttaaaatgttatgcaaataaataaaggtaggcaatgaatctaggaattttaaaaagaacatgaattagaacaagaattagaatagaaaaagcaattgcataagtgctttctctcaacagtcatttactaagtaaattcacagacttctaaacttacctcttagaataaaattaaataattctgaaatctataatgtactttatagaaatataatacttatagttttatatatttgcttttagaaaaagagcaaatgatatgtttatgtagtacagataaaggaaattcatattttgcatttgtttgaaagctatcatgctttacattaagatgtatttgtcaggcccaattgtgtaagaaaagaatgtagccaagagctaattcaaaattgtttcttggatatgggcccaaaccattaaattatacatttaatatcagtagtttctttcctattttacaaattatttatgatttccagatactgaatacatgaataacaataatgtgaaaattctaaaatcagaaacaaattgacttactaggttacctgttacctgtctaacacacagtagttaagtaaactcagattaaaatcagatctgtaaatacctgaaataccaattccaggttaaaatcatgcctggcaaatttaactggcaactaactgattagaataatacttgagatctactttattatataaatgtacatgaatacttttagcagcatacctataatctacgtatacattacctcttcccacatacatgcatatttcacatgcatactatacatgcacacaaatatactcctgggtatcctatcgactgctttgagttttaaagtaccatgtgtgtatttatttattaataatagtatagttcatgtatatccacatatacatggctatcaaaaaaatcaatgacaaaaacatacaaaatgcaatggaaagattgtcaagcagcagagatgcttggtgtcatccttgcactatcaaatatacacataagtatgattggagaaagagaggctaaatatctcactgtcagagaatgtagagaactgcaattcattctatctgttgtgctttaggacatgacaatttaatacaatgccagtggatgtaaaagagataaaaatggaacaaactgggccagtgtaatcaaagattttctccagagagctggctagggccggagctcatacgcacttataatagatcaacattgtattgtttctctcttccatgaatttgctatgaagcaaaattcagagcaaagcttatctgctgcaatgactctaaagttctactgagatccctcagatcctctcctcttatttctaaaagctggataagtgatgctaaaaagtttatttgatattaattggtttaatagaaatcattgctattaattgccatttgtatgaaaaagtatctctcatcagcatataatttattttataaaataatacaaagcaaaaccttcagtgcttaacatcactttacaagtaagacagagaaatattttctttagtcattgagctaaaacaaatgttgaggaatttttcgtaagtgatacggacttgagattgggcattatgcctaccttccaaaagaatggcttcttctttgtctgtaattcttgcaggagtgaggtattgcaaaagtattgttaaatagaatcatagagaagttagcttccttctttgatgaatagcaccaggtatctaaaattaattgcaaaagtatggcccggctaatgagatggtccttatcttttctcagccaggaagcacaagtatttttctgctggctcaatattttacaaaaatgcctgaagtgttattaactaagtaagaaaaaaactgattaaaatacctcaaagatataaattgttataaattgtaagatctgaaaaatttagagttaaagctgatttcctgcattatttttaaaccttcttttcttttcttttttcactttaaaaagaacaacaacaaaaaaatctttcctcctgcttctattagcatttttaaaagctgagttaattattattctttataaaatgaccaatatatattacaggtcagattaaatcaaagaaatatatcaaatgccgtcaatttagggaaaaaaacagaacaatgataccttatttggggaaaacactagaaaaatgatcatccatgcaagagaattaatggatatccacaagggctttgctaataacatgggttaattaccgctgcaacacactaggctcagtaaataaagcagcagtgccataaacacattaagatgagaaaccatcactgtaagaagaaatagccaacaccatcacccttagctctgcccaggaaatgaaagctgtttcttagtcctttctataaaaaagggatttttaaacttaccaccaaatgtgtatagggtaatacataaataccctgacacaaagggctagtggaacatggggtacccatcatttatccaccactcccattcaatatatatttcattaactcaggaacagttgtttttttgttgtttacttcaaggagaaaatcatatgttacataatactagtcatctggccatttcaactatatatagtttggaacatgtacaatgattacttaatttttaggaaaatagaattaatccgctcactttagtaatgtaatgggcaaggttacaaaactacagctcaagaatgctcacaactaattgcagctgattgtcacttcaagcagtttacagagaaatcatctgaaaactccaccaacaccacatacctttaaggctgcaggtgttttcaagattgtagggaaaaaaaataaaaaacaaaacatgaagaaaagtcatgtgagctccaagtctagagtttaagtattcttacttgaaaaaataaacttaaagtgtctgttcagagttctcaaataatatcacatctaaagtgacttggccaagctcttatcattccctaaaaaaaaggcatcccctctgatctcggcttttttgttgttgttactgttactgtataaattttttctttctgcctattttatcacctataatttgacattatggaattactttgggattgtcttgttttttaattagtatagattttaaaaagaagagatgagaaaaagaaaaaacatgaaaaccctgaaacagaaagagtgaaacatacaaaataaaacttgtgtagctccaaacacgaatcttaaaacacgaaacttaaattttcaatgtctggacttcagtgatcaggctgaaatttactaaactgttccctcctcgccttgtctgttttggagtgtttcagttgcctttccttcttccaacagctgtgacaactgttaaaacagtcagtaaaattaagtccgctctataatcctgtagtcaatgttacattttaatcagaggttgaaagggattcatgtgatgagcacactcatttagaatgattagactgacacatatgtcaaaatgagcagatatattattttcatctatttatgctatcagctattactgctattaaatgtgaaacaagctttcaagtattatgttctttaatgtgctggcacatttcctaaaataaaaaaatacatagttagaggttaacattttaagctctcttaatggtggtcaataaatggtatgaatctttttaacagcctccaaagcagaaactgtccaatatttgcccctaaaactgtataactctggtttcatttctgtgtatacacacacgtgatggggtttaacccggtacaattactatgaatattaatagcatgtataaattctgtggtttattaattgagacagagaggcagatgcgttgcttagcgttagatctttctgtctgtccagtgaaccacgtaaccatcagaactgcatccagacaataaatctgtattttttaaagatgacttttaattgagcccaaaagaaagctagtttgaatcttgcgccaaagccaaaaggacatgtgccttgacttcatttaaatgcatctgctttaagaggcttatctaaacgaattattcaaattagctataagaagttaaattcaaggaaactacttcaaaaagaagcctctgggggatttttaaagtttgttttctttatttatttacaagagaaagttcagaatctgggcgtgcttggataagacattcttcctgacacgaagacgtcttaaactctccaattctacagcccgaagtacactaaccttcaaactacacttgagcgggcagtcttacctttgtttatttttcatttttatttttacacatcttaaggttgtttcttcccttgagtgtttcaaactgatgcaagcacagccttataatctttcagttcctcctaaatccatctcttggctaatattccctgtgtgagcatggatgtgggtggatgtgcatgtgtgagcgtgcatacacacacacactcacactcacgctcaaacatacaggagcagccactgagactgcaagtcacttttcatctcttacttaattacaaagcaatgcaatatgcagtcactaaggacagctagtggacatctacctataatgcactacctcatcttctagagtttgatattttcttcacaatctatagagagaaatgtttgccaagggcactcttttcagaattataacagttggtattactgtaatgtgaaagcaaagcaatataactgactcaacagaaagggagataaaccagtgacagctctcgtgatatactaacattttatcttaacagtaggttgaaattaagtttatcacctactcatttacacaaaaatgcctaacttacttctcgtaccccctactcactcccccccctttagtaatctaaatatatatttccatgtgcataaagatatccataaatactaattaaactgcttgtaagaacgaaagtacttttctatattttctggacacaacaaacgagacaaatccacactctgagcagtatttaaggggaaaattttaaagtcactactgtttcttctttagttttttttccccccttaaatatttataatgtgtgaaaatctcatgttacttaatggactgatttgtcagttaagtgctgacttaacgctaaccatgcaaataacattattctagctcagaattgcatagggctagcttttaaattgttctctgaaggagaattagtaaatgtgcaattttgcctctaactctgcgcggtaagaaatgacaaggagctgaaaatatctgtcaaactgcaaatacataagaggccctcaatagtataaatcattttgaatattgtattttaaaacatctttccttgggaaaatgggtcctagtaaaagatgcattttaacagttcactaagcatttgtgccaagtgcctattcttagcacctgaataagaagtgactgtcacacagctgttttactgacagtcactgagctttgcctcaaaggtaacattgtagtcagagaacaattctcgacttactgaattaggagatcaccctcaacacaaaagacacaagacagacacaaacaagcagtcgtgcacacaaaatacccagggcattacctgaatcagtgtgtaaagatatagtctgtccgcccccacccccgcacccccacgacgagtttaaaaaggaaagaaaaaaggtacctactcttcctcgtagtgcagggaaaaagattcaggaaggcaaagttctaccgaatccatgtgcgaccggcaaccattatttgtgcaccccagctataaatcaaagtttccttgacagagcacagtgcaattaacacaaatgttctcctagtgacaagcctataggcacagccagttgggaccaaagctctcacactctcctaatcaaggacttaaagccccgattggagcttattaatatgaagtagggctttacatatgcagtcccaccggcccagccgcgcagccgattggggggcctctgcccaatcaggagggaggcgacgggaggctgcacggagcgagaggagccaggcaggtaggcagggtgcagagagccgaagggggctggaaactgagagtgggcagagaaaaagggagcggagaagggagcgattgaaacgctcccaatacacactctcgggtttgattttttttcctcccttctctctctttcttttttttttcttctgggaagctacaaaagaaacataactaacttaactctctaagcactggagggatttgcctttgatttctaacctaagatctcttttgccttgaaaaggagaactcacgcagactctcagttaatttgggaaaggattctgcggaaggtagagaattaagtttgtcctgccgttgtctgtgtttttattacaccgggggccgcggcttatttggtgctgtactttctcatgtattcctaatcatgtcttttcctgttttcctgatgtatgctgggcattaaaaataataataataaaggcattcttctaaattgtttgagcatgtgaactgggatcgtcatctctgaggtggaatgcagttttacacaactacagaagaggagatagtgacaatacaatttgaaagaatgcctaagtaaattatatgtgtaaacctttctatacctgcgactgtctctttacatatagatacaacgcatagcttttcaaaacaacggtaaacagccgcaggacaaattggcttcttcagttttaggggtggggagtctgagggctgtgggggtaaatagcgaattaaatctctctcgatgcattttgacaaaataaagacagcatttttttttttttttgtagggagagcattactaaacagtgcactaaaagtattcttaattatatgtatatatttcaatacaagcttccaaactaggaggcatataattttatatatgattttacccaaaacatcctgctttcaaataaaacacagtgtacacatttgtttctatacataaggcaccctatatgctttaaaaaaatcaacccagaaacattttataaaccatcacacagtctggtcactataagaactagtttcaaacagataataatttacaaaactaagaattctcaatcaaaagtgttcaaaaaaataaaaataaaaggaggatataagaggacaagtgtgttttttcctccttcaattgtgtacaccgtgtctttaatttccatataacaaagagtttgcttaggtcctattttaatctacaggatttttttatactagcaaatgtacattggaatagataccagctatttatggcaaagagataactgctaccttatggagagtgaaaaacccacaattttgatataattcagctctactgcttatcaaccttttacatcttaagtcctacatgatagaaatagtataatctttgagatcaaaataaattagttcagatattcatcgtatgttaaattcactaaattaggactcaactcccttaaccctctcaaattttctaggtctttaaaaaaccaaaacactaaaatagagcagccacattaaaattcagaatataaaaatgacagacatgatttggtccccccacagaagaaagcaatttcactgccttgtatttagctatatctaagatataggcctaattccttttatttgtgttctaaatgcatacaaagtttctagatcagaactcacatagcaaaaactgtgcctcagaatactgtataaaagcaggtagtaaaagcttaattaccagtagcattatgctgtctatattgttaaatgtgaactctgcaattaagatgtaaatttggttgtgagcagtgaattaaaagagctttgagatgtagaagaaaatccaagcattctgcagacactgagagaaaaaaaaaattgtctattcaatctaaaataagacacgtaatcattttacaattaaaaaataaataaaacaggcattttgcaaaagaaacatgatttttctaaaatacactcaaagaaatatggaagctaatactgcattacaaagacagaaaaacatcctttgattcatatgattactatcgtgatttctgaataaactaaaattctcagggtaattaatagattcaattgcacatactttaaaaaagatacacacacacacaaaaaagaaagaaactttccttcttggtttggctatggatatttctttaaaaaatataaattatttaatgtactcaatgcatcttaatgtactcaaagaatgcattccgattttgcaccggtgcagaatcctgtactgtgttcagtttctttacattatgctgtgacagaacctctttattactcctttgaaatggctttttaaagacaagatttgtagtgtatttaccggtggatctcaagtcaccaaatgtcgtacaagtgatctttaatttcccatcattttcttatttccctttgggtacttatttgccctcattatgatccatttgacttcactggtgtatatttttaaagatatttagactcatgcgtaagtcattgttctgtgctcacagagatacatgtacaaacatacatagtgtcatccccactgatttttcactaaccatatttcatctacgcaaggtgcagtgttcactgaactcgctgctttctgagtgaccagatgtgtactaggtttgtagacttggatattttccccttgggatcaaagtatcacctgtacaagtcaaggacctaaagactgtacttactgtcttgaatccagtttaaccaatttaaaatttttaaaaatcctcttcactaaacttgtgagacagcttccagaatattttacaaatacacagctcagtcatctcaagaaacttccctggtcccagatttttctcaccttgcaggagaaaacaatggataatcatgggaaataaatgtgccatgagtaatactgagcttaaaccttcaagaatctcaattacaaaaaaaatctggaaaaacaaataaacaaacaaacagataaacagcctaggatacacatatattcccagtctatacacttcacaatcttaccacaaggagtctacccaaatcaagaaaaactgaaccaaacaaaaggatctctcatgattgcttcacaaagaatattaataaattagttaatatcagtctattatgcatcaggctcttggtgtatgcatagtttcaatctcttcttccttaaacaatgcagtcataaatatccaaacaaattcattctcagtccccaactaatgcacagtcaccaagcagagaatatacttcatttctatttcaaagaacagaatgaaaacaagcaaagctcaagtggaaacaacaggaagattcctctagtcatatacaccagacattttattacatttaagtcagaatcatttcttgcaacattctaactaggaattcttatgttgctagaaggtgatgagaaatgcttagtcttgctgttattgcatattaatagctatttttagctcctatctttcttttctgaaaattaacaggactaaccttcattaaaatgttcaagtttatcactgtcatttttgaagcaggtttttattttatattacacattcatcatttactaaatatgtaaaactaaacaaggcataacaaatttagattttcaaattgcctagtaatctttcctcaggattataaaatctttgaaaagctgtttaactttttgaactattttccctgctgttttaaatgtatcatatatagtataatataccatcctgcaaaaagcaaaccaagacaattacaaactactatctttaactccaaaagacaaccttgggaaaagaacctaaaatgagaagcaaggcaccaggctcccttctactcctcatgagctgtgtggccatgggtaggttgcctcacttatctgtccctcatttcctcatctgaaaattggggtttcttttgtgctataaacctgcttaagaacacacctttcccactgagaacacgcagacttctttcgaagtcaggatgactactttacactatattaccaccagccctctatcaattcatcattcctcattttctgttgcctttcatttctagggcacaggctttgatatttaaattattgtctcgattggcaagaagcaatcatttctgctgaaagtgatcgcttccacagaagcactaataaaaacccttccttttgacaaacctcttgtcctataaatccatcccattcccaaattatggagcctatatataaaaaaaagcccattctctggggagcaactgtctcaccgacataacacactaaactcttttcccactgtttgtgaaagttggagggggaaaaaaaaagaatcagagaaagacagaaactaatagaggcaattcagtttctgtttaattaattcaggattatttcaccttcgttttgtcaaactaataatacacatggtgaaatgtcagtaaaaattaaattataaactacagtagctccaatgggaaaactgaccttagttaggttgtatttccatcatacttaccctggtaagataccaaatgcattttacagtatcctacaagctttctataatctgcatggcatgtatttacagagcaatagttaacgttttgagattatacattaataaataagttgcagttatattctttcctgaatgttaagcaccatgagctaaatgcagaaaacattcaaggtcaatgtcccattttagaccttttgaggcagctgtaatattatgataatcaagcttaaaatattcctatagaaagagtaaattagccttttcacttgaaagatgattatgataaacagtaaacctaagagaggacaaaatccctgtttttaaaagccataaattgttgactcaatcatgtgtgtgatagtgttgtccaaaataaagggtagcttaactctgagaggaaggtggcgggggcgggtagtggagatagagaagcagggggaagtggaacaaacatgacagattccagaataagcaatccatgctttgataccagtaaaatgatcaaattacctatcctaaccaccccattcaacatataatatatttgagtctaaaaatatatatatcataaaacatcaaaaaaaagcacaatgtatttttttcctgacgtatatggatgttcaatacaaatttaaaagctcccttttcctgtggcttgtgttaatccttttgtccgaattttcaaaggactagtaaaaaaaaaaaaagtaagatattaacatctggtatccatataaacaggtttaaagagttatactttttctgatgtttgaactctctgacacacttctaagatttctttttataaatgactatgtttgataagagtctccttcccccaaccaaggcaaattaattagaggtgtgtgtttgtcagacctggaagaaggttttagagcaagggattacaggtcattctggaacatgccttgggttcagattccaattatgagggatgaggctttgtactggagtcagcttcacccatcttaatctcagtttcctcagctaccaaatgggaataacaataacaatcttatagaattcgtatggggattaagcaggttaaaccaatttagcacaatatctggccccagtttggggaccatatgatcccgtgcgctgaggaaattttggcttgtgccagttgtcctagcataacaatttacagaagcaccttcttacaccctcaatagtgcccccgtttggagaatacattttattgtcatcctacaattagtgagccttccataaatgttagctatattatttttaaatctttaaaaattattttacaaaattttaaaactgaacagagagatgcaagagaaaggcattgtaattcatttggcctccatctctgactaggagtgggagatactggatacagaaaagaaagtgaagtgcaagtatgttacattatgaattgcttgccatactgccacatatacattggctgcatgtaatgaaagggaaaactaaaagatgttccccttaaagttaccatgatgttttctgcgtggggatgaggaaaacagacttgggaaagttaactgattctgctgactctccagagaattcaattgtacattgtttaccagaaagaaggggagagagaaattgcttgtactccatttctcttcctttaagacacttcttccacatccctctactctagcagttcagtcaataatgctgttgattttattactatcccaagcacaagctcattcacctaggagctcttttgatcagatatcccaaaaactcaatttcttcacaaggctttgctcttgttacattgaatggccactaatctatggcagcacataaagtctgggcaatggggaattacaggctgggaaagaccatagggattatgagtccagcttggttactttacaggtaaaggaaatcaggctcagaatggttaagagccttaacccaggttacatacctaggtagtaggaaagctcctattagaaaagattacatttctcccctttccagtgcttcgttagcaacaagccaccaatgttagtgtcacaattgttgacactatactagcgcatagaactccgacagagatctgacctctctgaggacacgtgtccagtaaaagccaagggagttctgaacctaagagataaatatccaagtgtaaaccaaatggtcctctactttctccaaaagcttagaaaggtaaaaaaaaaaaaaaaaagaaagaaaaagaaagaaagaaagaaaaaaaggtacatagttaaaaagaattgggaatgtactggtagaaataaattctgtcttctccccagctaattattgtccttttataagcacattttaactatcatttccttcagggattcagttttgttaaatggccacacctttccctactctaaactctatctgactgtaatctgtgagctgggctgggcctgacagtatgcccatggccagtaatggaactcaagacatattcctgtcaatgttataggaacacaatgaatatgtcttggatgagtgaatgaatgaatgaactaatgaccaatgctattactcagttaattattcattttaagggaggctgccaaatttaatgagataattcaagccaggtaactagagtaatatgggaaaaatttaagagataagatgattggaaaaaataggtaaatggtgaggcggaaagttggtagaaaaagataaaaagaggaaaaaaggattgaagacaaggcctgctccatgctatactaaggggcaccagcactccatcatcatttattcttctgatagctaagaaggagcaatgtacaatgattgcttccttcctctactttctaattttccatgttttgtaaatattcatattgactaagtattggataatgaaaacaattattattaaaacaaaagcaaacaaagctgccatatcagtacctaaaactgtgacccttcccagggtaacatggaaacatattctcatttaatctgacagcaagtgcttttaaaaatcatgatcccagatatgtcctgaacccaaatatttttaagtgttcaaaaacggttcttgtatgcaacataaaaatttctgtattaaggattttaagtacttttcattatctaaagatttatttggttaaatgttgacaaggatcccatgaagaatggtcacagagttcctatttctatgagatgtatgactggagcagcagtgaacactgaatactttcagtgggaaggtggatttttcctcttatggggagaggaagaagggaattaatcagcagaaaaagacaaaggtcttacttttaggccgctgtttacctctctttactccttgcaatttttaaaacaagacctgtgtgttttgcttgatgatttcattgcaagagcaaggccctgatgagaacatatcacattctagagagccaactgttatctctagaaaaccacattttggatgcaaaagagagtaagattccctggttcaattattacacattcatatgtatgtatcaaaactcaatacgtacccccaaaatatgtacaactattatgtatcaattttaaaaagagtgagacaaagaattcctttcccatttccgtggtagattaaattaccaggaatggtgatgggggaggggcatgaggcctgtactcaggacattgaaatcctggggctgttatctcacctacagtttgtaactaagtgcacagctatttggataacgaaagtttatccaatcaaactgtgttaccgaaaagcaagagttcagttaccagttgaattcggaaactaaataaatcaaagaccattttcattagtgagaatagacatggattaattcatccttcgataaatcagaacgttaaacaaagaattgaaatttaacaaagaaatttttttttaatttttatatgtttaaaatatggacagaaaagttagctgtttagaacatttaaaaattctaattaagaagtggaataaaaaaagaaaataaaaaataaaaaaagaaaataaaaaaaagaaaggttttgtcaacataaaaaaaaaaagaagtggaatacccaatatttttgctataatttaacattaacaaggcaatttcacacgtgctccttttgttcctcacaacaacttgctgtagcaggtagaaacttcattattattatattatcatccccattttatagatgacactgagattcaaagagtttgttgattgcccaacagcactcagttttcatgctgcaaagttgacatctggatttattgatttttttttttttttaacagagacttactgtgtcgcccaggctggtgtgcagtggcacaatctcagctccctgcaaactccacctcccggattcaagctattctcttgcctcggcctccagagtagctgagactacaggtgcccaccaccacacccggctaatttttgtatttatagtagagacgggatttcaccatgttggacaggctggtctcgaatgcctgacctcagctgatctgccctactagtgaaaatgtacaatacgaaaaggaaaccactgggcatggtggcgtgcacatgtagtcccagctactccggaggctaagggaggaggattgctggagtccagcagttcaaggcatcagtgatcaatgatcaatgatcaatgatcacacctgtctatgaatagccactgaactccagcctgcaaacatagtggaactccatctctaaaattaaaaaaaaaaaggggggggaggagggggactcttgtggtctcaataatttcccttctctgtcaggaattttactctggttaggcatagctccaaattgactgctttctctttcccaagtttcccagccatacaaccacagcaaaattctaggatatctgagctaaggaaccaagagacttaaagaggagcaaaatcattcctcattaagacagaagcaacaataatccaaaaaaaaaaaaaattcaactttaaaactaccatatttgcttacagtttttcaaagattcccttgttaataaaatagaactatgatcaacccatacaacataacagctttcaaacattcgtgttttcttcagaattattctgtttcatctccataattttgctagcctgcagtataagggcatttttttttttttttgtcacactaccaggtgctttggggcctgggtatgttactgctaagaagatcttgggagaaaacagggccacatgttgctttccctattagcaaagatgcttaaataagacaatattagctttaaagggctgtttttgtggtgagagctttctagtactgcccacgttctgccccaacattgacttcattgccgtcattgagcagttaaatctattcaattattcaatcctaatcaatatttcaagatgtaaagaaagtaaatgtaaatattttgtttatttttaccatacttaattcatgtgctcttattggaggagaaagttacatatttataaataaaccattgcaaaaaaagcggtgggttccttttcttgtaatactggctctcatttagtcagctacaatatttagcaacacaatccacagggtagataaaacactctcagtctgggcgcagtggctcacacctgtaatcccagcactctgggagcctgaggggggcggatcacctgaagtcaggagttcgagaccagcttgacaaacatagcaaaaccccgtctctactaaaaatacaaaattagccaggtgtggtggtgggtgcctgtaatcttagctattgggaggttgaggcaggagaattgcctgaaccagggaggcagaggttggtggaggtcgcgccactgcactccagcccggtcaacagagcaacagagcaagactctgtaaaaaaaaaaaaaaaaaaaaactcaccttcaagtgttccctttgggaagccttcctgaaggggcaccaggcagaatcaatggccctctcctctgtgtcctatcatgctttgcgcttactggtctaaatggtttgtgtcaaggtagattgtccttatgtgtctctgccttccattgagtaaacttcttgatggcctttaatcctctgcactgtgcctagcactgatatctagacattttagactctcaacaaatatctgccaaataaattcctgattttggcaaaaatgttcacactcattgatatggtttggctattttgtctcctccaaatctcatattgaaatatgaccttcagtgttggaggcgggcctagtgggaggtgttcgggtcatgagggcagatctgtcaggaatggcttggtgctgtcctcgcagtgatgagtgtgttctcactctggtagttcactagaaagctggatgtttaaaatttaaaagtgtgtagcacctctcccctctcttttgctccctatcccaccatgtgatatgcctctgccccttcaccttccgccatgattataagcttcctggagcttcaccagaagcagatgttggcacttatgcttcttgtacagtctgtagtgaacaaaataaaccgcttttctttataaattacccagtctcaggtctttctttatagcaatgcagcaatagactaacgtactcatacaacttgagttttttaaaaatgagtttcaatgtttctttgaagaaattttgtcagtattttaatggggctaatatatttaccctttcaaaattagctactcattaaatgaaacattttgacttatgaatttcccccctctaccctgtaaataaatttttaaaaaagttggctactacatagttccatattcttttttttttttttttttttttgagacggagtcttcctctgttgcccaggctggagtgcagtggtgcgatcttggcttactacaacctccgcctcctgggttcaagtgattctcctgcctcagcctcccaagtagctgggattacaggtgcctgccaccacatctggctaattttggtatttttagtagaaatgggttttcaccatcttggccaggctggtttccaactcctcacctcaggtgatctgccttcctcgcctcccaaagtgctgggattacaggcatgagccaccatgcccagcctcattgtttttttgtttttgagacagggtctggctctgtcacccaggctggagtgcagtgatgagatcatagctcactgcaccctcaaactcctgtgctcaagtgatccttctgcctcagcctcctgagtaactgggtgtgtgccaccatacccagctaattaaaaaaaaaaaaattgtttgtagagatagggtcttgttttgttgcccaggctggtttcaagcttctggcctcaagggatcctccagcctcagcctcccaaattgctgggattacaggcgtgagccaccacacctggcccatctttttcttaagacaaggttgtgcagcaatggcaaatccctgccctgcctccacctctgtcacccatgagagaacctctagaacaattattcactagttttcaatctttaacattacatttataaataaatctacatacttatgtgaccctgactggtctcaattaattaacttacttaaaaatttcaggctgggagtggtggttcatgcctgtaatcccagcactttgggagaccaaggtgggtggatcatgaggtcaggagttcaagatcagcctggccaagatggtgaaaccccgtctctactaaaaatacaaaaattagccaggcatggtggtgcacccctgtaatcccaactactcgggaggctgaggccgagaattgcttgaacctaggaagcagaggttgcagggagctgagatcacaccactgcactccagcctaggcgacagagcaatactccccatctcaaaaaaaaatatatatatatatatatatacacacatacatatatttgctttcctgggtcactatactcaccttcacttgagaaagatgagaacagggggggagtttcccaaatgcccattcctagggtattaatgagtaacctttctagaccctatgatccatccaaaatatggtgcttctaaggagttaaggactattttttttttttttttttttttttgagacagagtctcgctctgtcgctcaggctggagtgcagtggcgctgtctctactcactgcaagctccgcctcccggtttcacgccattctcctgcctcagcctctccgagtagctgggactacagccgtccgccaccacgcccggctaattttttgtatttttagtagagacggggtttcaccgtgttagccaggatggtctcgatctgcggacctcgtgatccacccgcctcggcctcccaaagtgctgggattacaggcgtgagccaccatgcctggccgttaaggactattttaactgtgatatttatcccctcaagttgacgtcacactgaattttagggtcagagtaaaaataccatctctgaagctcccctctttctcagagaagcaagagttggtagaaagaacagttgaggaagaatggtttttggtcatctgtacccttgcgctagctgctgcatttcgctgggcttcagtgaacaagagggaaccggtgcagagattccacaccagcagaatctccatcaagtagaagctggttgaaaacacaaatgattaggctccacccctgacctactgggtcagaaactctggggttagatcccagcagtctgtgttttaacaagctctccaggtcattctgggacatgccaagatgtgagaataggatctctatagacctgtttccctctaaaggtctacagtttcatcatcaggaacagagcttttattaaaaataaatggctcagaattcgctttgttattcatatattctccacccccagcccctacgttttttaaacttcatgtttcaacacattgagtcttaaaaatcaaatcctgcaacaagaaataccaaataaattaataaataaagtgatgctggctgctacggctcagtttacagagaggaatgtggtccttggacttttaaaaactctaaattcagttctttctctggctagtatatgtctcatggttcactcagctgcatctgcttcaaagtttgaagcaaaagccttaaaattggtggagacagatatggtgaccagaagagctgcagacagtggttcacccttgttttgagcctggcttctgctattctttagctggtagacaggtgggctggtgggttaaagtcttgtatgtctcagtttcctcatttttaacatggtgatgactccaatctcatattgttgctaagggattaaatgaaatggtctatatatagcattggtttcaacctttgaaaaattccaatcctcaggcctcaccccagccaattaatttaaaatctttggcatcaggagttttgaaggctcccaggtgaattcaatatgctgccaaagtagcaactgagacccactgctaaattacttagcccaggtcctggaatcattattttaccattattgaaccgtgtaaaggaagtgtatgtaaaagcataaactttgatatcagatggcctcgtcttaatcctggctgtacagactgttggctgtgtgaccttgggcaagtacctgaattattggttttatcatctgttaagaacaacaattagcaagaagggattaaaaaaaaaaaacaataaacttatctgcttactcagtaagattgttatgaaaacaaataagataacataaatccaagctcactgtgaatgatgcaagtataagaaaatattcgtccttacatacagcccacaaaaactatcagtggcttgtgttagatgccaatcactaaatgcaagtgacttccagaccttcactagttctgcagatgagacatcactttttttttttttttttttttggtcatgctaataccccaaagctcaacagtgatcataggatgagataatctggttccactttggaatcacctggagactttttaaaagtacagctgcctgggtctcacccagtgaaaatctctgagggtggggtccatacagtggtatttttgggataagatctactggggtttcaaactgcagccaacattaaaaagaaggaaaaaggtgaagttaactgctgaggaaggggcttagggtaaagtgaagaccatctgtggactccagcttttgtagtgacacaatgctgagaaaccaaatttccagggatccatcagtttatgaaactttactaaaataagtcctatactgccaagcaactaaggagaaaaaagtgaaccataaaatgcttatcaatgaagagctgagtataatgtaaaaatctattctaaatactatgcttcagagtaaaaacagatgtgaaatggttaaacaaaatctgtggtatcataaggcaataaaatttagttgcttttcattttcttccttatattcttatgtattgtttagataattttacaatgaatgcagattatttatttaacagaaaataacagtcaaacagaatgtagtaaggggaaaaagtggattaagtaggggaaaagtatgaaatggtgagacagtaaaataaatgccagagctgagaaagatgaagcagcgtgcacttataaacaaaaaaaattctaggactctcaaaacactggcagattcctgaatacatgctaatgtttcacttctctctgcctagcaaaatcttacttatcctttttaaaaattttatttgttatttatttacttatgagacagggtctcactctgtcacccaggcctgtcacccaaactggagtgcagtggtgcaatcatagctttctgcagcttcaaacttctggcctgaagtgatctaccaccttagcctctcaaagcactgggattacaggtatgtcccactgcaaccagcccctacttatccttaatacttagtttaccttggagcggaggtcaggggaggctcccagtagaatagagacctcagcatccctctatcatctcaactaaccaaatgctattaatgttttcttcgtatttatctgattctcccatgactgtaagcctcttgagagtaaaactgcatcctgtttatctttataaataatcccgacactgagagacaagtgcataaaaggtatctccaaagattcattaaagtgaaaaaaaaaaaaaagttccccagctgtgggaaacaggcagaataagatgtgatataaacatagttctacataagctattttttaaataaaaacaaaacaaagacaactcctacacataaactatcttctgtgatcttttggactttctatttgaggttaacagtgaagagctgccaatgctcattgctcagtgggtttaactgataggtgctctaaaaatgcaaatcatttgatcgtctgatgactggtatgtagagtttataccagtagttctcaaaggaaaatatcagtattatccaggaactgttagtgtaaattctcggccctgccaccccagagaaaccctggggataggattcagcaatctgtgctttatcaagtcctccaggtgattctgatgcatgttcgagtttgagacccactggtctaagctaaaagatttagaagaaatgaaaacccagctcactgctaactccttctcaaaatctattttgctaatatggctctcctatatgtgccatggaacccaaactctgatgcgcaaatgtttcaaaacagaccaagacacctctcaactgttaaaattcccacctccgacccctcaggagaatgaaatttgagatgcaaagacgtctctttcctacagtttatcctgccagactccttcattcctcactctgttccctgcagattgtcttgtaaatgtggccagagacacatcttcagtcctgagtctgactgctgacctcggctatgttagcccctttgctgctgaagaacagccccttggatcactgacttgctattattctatgcttaatagccccgacctgtgcaatattttttatctggctacagtcctatctctaaattctctattttgaatgaataccaattttgtgacatgaagtcttctatataatgaaatgcaaacaatgaaaaggctaaatcagtttacaaaaaatctatttgtcaaacagtgtggagatgttcccaatttagtctgggcagttcatgcagctcttgataagggagttaaaaacctagctgttcacagaatgaaaataaaggcatctgcaccacagacacattttcctttcaaaagtctttgttgtaacttgtagctaattaaatgcccttacacaagaggtgcacacacacacagcaaaatcagagaataattttacaagagagccccagagaagaggagagcacaacacaagcttcccactaccatctcttatattgcatttacatttctatacagcttcatcagcctgacaaaaaaagcacaaggggaggccttttttgttcaattttggacgagagagatttctaagccctgcaaaggaacgtgcttaacattaaaaaaaaaaagaagaaagaaagaaaaaaagaaagaaattgtaaccctgccttagatgcttgtggagaaataatgctttctacacacctttctatatcaccgacagaggaactaaaaaattatcaagaacttaaagtgttccatttttttatttgtagtgttttcctcactcctagagattatttgcaggcagaggtgcccctgtattaagcttgacatttattggagtggctttgaatttaccatgtcacatttatcaaaatgggattatatatacatattgacattctttcatttttccaccttctgaatttaactatttcattgggcagaatttaaagtgttaattctcagataaattttttaaagtcatatacgaaattggttctcaaatataactggcattgagttatcacagtcccccctctctcttctttcacgcccccgtccccatatgggaagactgtccaacataatgggatagcattggatataaaaacagaacattgtctaaacagaggattgaaagctctttggggtcagggtaatttatattatatttatatttataatttatataatttatattatataatttatatttataatttatattatataatttatatttataatttatattatataatttatatttgtaatttatattatatagtttatgtttataatttatattataattatttctttatacctgttcacaatcctgtgtcactacatgtgtggacccctcaggctaaaacaccaacctcacaacccctttctaacactcccccccgcccctgcacacaccccaaaatacccccctacacatacacacacacacatatacctcttttccagatggaaactcagaaagatcacctcctctcgggaggcatctcttatcctgccatcctttagcattttcatatctgtatgtgattttacttctcttattaaactgtaagctacttgaaggcagagaccctgtctcatctcagaatgcttagaacacagcttagggcctgacagactggatgttattgaacaggctgtttaatgaataaatgaatgaatgcaagcctagctgggcaattgctgtctaagctttgaattcttactattatgaaacagatgaattcatgcaaccctcttgatgtcaaaaaataccacactttcgtacatgggtgcttggaatacacttgtcaacttctaagtcctattggttctcactctaaatcatctctacattctcaaagttaaattccaactgcctgaatttcctcactggtggtttcattggtctctctccctctgtttttctgcttctttctaattcattctatatgccattctcaagtacttttaccccacattttccactgttacagaacaaaatcaagattcttttaacctgaaaattcaagtctattcataacctgacccaaaccctctttcctggcaagtttcccacaagtctgcttcacagagcctgggtatcacagccttcacgtaacctgaacacaccaaatgcattcttatttccaggatttttgcctcagctattcccaccatcttatatttaaaggacatccatttgtaatgctctgtatacatgtgatatgtctttataaagtaggttagagccttgaaaaagggcatggccaatttgacttgagagaggagcaaaagatgcagattttctgagctatgtctctaaagactgttgggggaagaaaaatttgtggtaagtgagcaacctttaagataaaagagaataatggaatcatgtttctccaatagaatgtaagttccttgaagacaagaactacctggttcatctttatattcccactagtacccagtagagtgctttgtatgcaacaactgactagtaaatatttctttaatgattctttatccatttctgtcctaactccatccgaccctttcatacagtaccttgcatatactagatactcaataaatgacagctaaatgaatgactgatttcttaatctttccattccttgttaaaatgcaaaagtgggagaggaacagagtaagtaaaattgcagttactgaaaaaacaacttcagaaaatgaatcgttatgaacaccaaatatgcttattttgtttacacaccaaaagtaaactgtacaagaaaacaagtaaaaatgttgaattcacatcgccctctggtgttggactctcccagacaattaaaaaaaccctcaaacttaagagtttagggagattttacttcaaaataggagcattcaaccttccctgatcaaggcaaaatgagtgtagcattgaatgagaggtgcagcatctttcaaatttgcttcagttgttaaagatgaaattattaactccaacaaagtatggagcctctagtatatttgcttaatggagtgaattcctccttctgtcaaagtcactgtgtctcaccatgatagtcattattagagaccaatggaatgaggctgctagctgtactacaggtcctctgtataaaaggtgtgctttaaaatctaagacaatatgacttttcaacaatagcatacaatggaaatgtatttatttgctaagcctgagaaaagccattgagtagagaatgaaagttacaaaacaggcacaggctattcatttgctgttaatgctgggacactgtgccaaggcagctgaaataaaacaatacaccctccttgaggtgactcttaggatcatggagagaaccctggaataaatatctcagtgtgaaattattgttctgtctatggcatagaattcagaaagtcccttatattaaaaaatataaaagtattcctcttcagggtaatttaatttagagagctggtttaaattttctgaaaactaatagcatgttttgaaggcagtcttagacccagaaacataaattagaaaacacattgtgccatgattcctttagagagtttttctagcaagctgttagccactaagtgctctcaccattgccatcatcttcactgttgtcatcatcatcatcaccattcatggataacactcatcatcatcactgtcactgtcgttgtgatcacagtcattgacatgatggtcagtgctgctaagtatcacaggtttatgatgtgctaggactgtgctcaaaattttacatcatttagttcatctgaacctcacaatcatctcagtaacattctaattttactgattaggaagctgagacttcgtaacttactataacttccatagtaggtaacttgcagaaataattctaatcctgcttacggaaacttttgctcttaatcattatattgactgccattaggtaccagattttacttgtgattcctctggacacggtgccacatggagtgtgattctgttcatttatctgctgtattcctctttttatctaagtgatgagcagaaagttttgctaggagggttttaaagggttaagtgctttaagagaacaaagccatagagttcagtcttgggtggataaggaaccatgagggagtaagaaatacattgtccgttagagtctcttcctctgtgcctctgaacaaacggcaataaaataaagagcatgaaacttctgggtgctaaatcaatttatttatttatactatatttggcaagcatttattacattgttgttagcactgcactaggcgctaaacaaaatatttacacacaggagaaatgcaagcccatattcttgccttgggaagtaaacatcaactgtacaacattcatagggtaactcattcgatgttttaatcaactccatcccatctgagtctagtaccacacacttgaatatgtgcacacagacatgcacacacacacacacacacacacacacctctgtacacactcctaaaagcaaacgtccaacgatgccaaaaacacacagatttcaggcaaaaactttcaaaatttgtccaacaattaaaaataacctgattttaagaaatgcacacacataggacttatagaggttatttctacatctcaccatctttattcctggcaatacatgctgtgttacctatgagtagtctctttttggctacaaatgtgtcccatcttccatctgttcttctagcaatattgctggcttactgccattgaagctacatcagccttcatgatgtcgtctgactaggttttctcaagtacccgttcatttagctctccaggtgagggcaggcatatacatttttctgtagttctctgagcagggtttaactttggttccatattagcaagtgtgtatgtttctgctctatttaccaaagtttgcaaactatttcgatagagtagaaaacagagtctaaagttcctcaagaaattgctggctgagccatgagagaactcagcccagggtctcaatttttcttttataatgggatgtcggttagaggtgtgcctattaaagacaatactccctggattttgctatattctttcacattttgcttgtctttcatcctttttttgttttttgtttgtttgtttgtttgtttttaagtcgagtctcactctgtcacccaggctggagtgcagtggcacaaccatgacacactgcagcctcaaactcctgggctccagcgatcctctcacttccagcctcctaaatagttgggacaacaggcacacaccatcatgcacacctatgtggtttgtttgtttgtttgtttgtttatttcccatcattttttcccaaagacagggtcttgctatgttgcccaggctgatctccaactactggcctcaagcgatcttcctgcctcggccactcaagttgctgggattacaggcatgagccaccatgcccaatatgtttttgcttctttcattcacttaagtaacatttttctctattgcagacactgtgctatgcataggagtttttaccctcttgagttgaaggctgaggttccccctgccccctcctttccctttgtccagtctctcaatgcgtgtattcaatgcaggctggttagccaattgattaggaggttgggtaagtttccatgtcagctctgtgtattactaggagtttgtccttgagaaagttacttaacctctctgtattcagtttactcatctgtaaaagacacactcaataaagaatggctattatctttaaattgtattatggtgatgtatatttatatttcagtcctcatgtagaaggcaattatctatgtatcaaactcattctgtaaattgtaaaaaagtatacaaatgtaatgtggtgttattatttaatacagggtttaatataggctttaatgtagagtttgtttcaaagagaagtgaaaaatatttgttgaacacctactatgtcttaagctttgttctgagagctttacttacagtattttgctcaacctcaaaaaagttcaataatgtaaaaataataacagccttcttttattgtgcaattatctaacaatcttaataatgtaaaaagtagatattatggtgataatgattctgattttatgaagaaataaaaagaaggaaatgaagctcaaacattaacttatccaaggaaacctggctagtaagtgacagaaccagaatatgaccccaggactatctgctgccagggtctgaactctttctgctacaacacatgcttttcctagatggaagcaatgtataatagaggaggcccaagctaggctgatgaaaagaaaaatgataccaaactaataaaatattcatatttacaggcaaaatgccctcattggaaaaatattaatttaatatatatagtgttttatatcccaaatagtatgacatccacataaccgtaaataacagaagttaccaaagctaacttttaaaagaattctttgcttaaagttcttaattttcgtagtatttttgcttgcctaatgatagaatgatggtgtcaaatttgaaaatgtaggcagatgtattcatttttaaaggtatcacttggaacgtcataccatttatttagatcctatagctgattagtgacctgtttaaatagataaaactggtaaatgtttgatgaaataataaacatgtgcactgaatcttcatctcctaacttaaagctcttacagagttgtcaaattctaaataaacaaagactggtccctttttccaaaaactgtctgttcatcagataaatgaagcatgtaaacccacgtgcacacactattttgctttactttgtgctatacctgtttgcaaggaattgtaaccattttccttaaaacggccttatttaacttaatttttttccttcaatatattcaaaagaccttagattattatcagtaattatcagtatgacttagcaaaggaaacctcatcaaagaactcataaaacaggcttcatagaatttgtattttgtagacttgttttattttattaatttctagcacaaacatctcactttaaagcttccaaaaatgcttgcacacccctaatctgattttacctatttgtgagataaatgatgttagttttccagttttattgattatgaaacaaggattctgagacgtcatttaaattgcctgggattctatcaacccataagtggcagagacaaacttgagagtaattacccgcatcccaccaggcttctttctgtcttagccctgtgtttattcttctgcctcactctatggcaataccatatgatgggaataatgtcagtgttcatatacctctttgtctcacgtgctaggtcctcacaatatcattcatatggctctgttcctctgcacaggtcctttatagcatcacaaggatataatgatagattgggtgaaatccctctcccctacccctatgcccagcaacacagcttctctctgatttctctggatatcccagacacaggaaggtagagcaactgggtatatggcccacaatgattgcatttccttccaaaatagttatgatgatttttatcaaataatccataaacacttaataccaaaatacttactggtataattctggttctgctgtgagcaatttgtggactttgagcgaaacgttcaatcattttaggcctcagcctaccaactttactgtgagaaaaaaggactaatttatacaaagtctattcaaaccttaaaatattattaatctatgaaaacagtatgtggcataattcaaaaaacaacagtgctcaggaggctaagatataattaataaaatccagtaggtttcctccctcattttgcctataatgttgcttattctatcaactccattttgctttagtttcttgcaaatgaactagaaaggtgattgtataaaggttaattctatgatgtcagtaacatgaactttaataaaagatactattgaaatagagttattactcttaaaatgtagggcattcagataggactatattgggatgtaattattgatttacaaataaagtttagaaaataagaagctttggaagcagagggtaaagctggaatccctcataagcagtggactctcaattcacttgtcaatgtatagcctagatccacacttgctcagaacaggttacaagtatcacactagttaatccatgctacccagacggaatggaaatggacattttgtggcaccagaatgcctagctactctaatctgtctgggaccccatttttttaatgcagtagtagcagaataagaaaaacatacaagaaagtcaaatgttttcccaactgcagaagcaaacactttgccagaaattccaaataatttaaaatgtggccttgctttctctccctctctctctctcccttttactatcagtaccaagccaagagtctaaatattaatagaactatttatacaggctgttgtccaccttaatgcagatttttcaaatttcttctgcaacttgctgtatctgaacacacagaaacctcttatttctcttgtgtttgctcaagttacacaagtaagttcatgaacattttgccaatacacaaattctgatttttttgtggggaatataagtcatccctgtgtttataaagtgacagaatctggaaggatgttgtcaggccagccaactttttcaaactcacttaaatcaagtgctgttattgaggcagacgacgcacagaaagcaagttcacatctgagtgcagtggttgtctccatctagaaataatctcaaaacatggtatgtgagtgtggtctccttgggggcaccacatacccttatagacaggcacagagctggggaggggcccatccatttgagtctatgcttatggggtggcaatcttcagttgcctacggtcgacgtagaaagacaacacctgcttaaatcaaatctctcatccatcccttttaatttgtcatggctccatgctctttattccagtccattctctttctagcactataaggagcagggagagcaggcaagagacccagcagcagcctgtttgctgggaacttgcacagttaaggtgtctaaatatttttttttttgcactgttatgccatcacttaaggatcaattaactggtctctgtggcaaactgctgttcagtgactggtgccatccagtgcgctgggcaaactgacaccaatgaccaatgctccccatggtttgtcgtgtctctcaggttccctaagaccataccgacggcacctgttaaagctgcttctgctaagctgttctgcatttgtctggctggatttggacttcctggatctctgactgaatacaaagtgattagagagcccagtgtttggcaacaagcgcgatagggaatacgctgtgtgtgggtccacaggagcacaatgttcttcataaccccatgcagggagcgccctgctagattccctgtgctgtggagatcaaaatggtctcttttgtcgtcagctgtttaacagcagctgtttaatgtaattccaaatgatttgcttgaatgaagttgtcattcctgcagtaatctttaatttggtaaaacacatagctgagcaatgctatttttaatattattttagctttaaaaaagtttccagtccccatattttccatgatgatgacagatcgaaatcattactgggaagtataattacgcaaaggagaaaactagatattaatatcagcatttttctacctaagttagtcaaatgctaattggcaaatagaggtttatcaaaacaaacaaaaaataagtataatgaagttaacagaagaatttttgcatcataaactttatccccatctatcactaaatgtaaattgcaccttttttctgaggaatatgtcttatgttaataaactcaaatagctagtctaggaaaaacattttaaagatttcatgttttaagcatttggacaatagtgctcaaacattacaaagaggaccacaaatgaatcaaccaaccttccttccttcctttcttcgttcctccctcccttccttcagctttattgattatcatccattgcagtttgtagagaagtctgtttacaaggcaaaaaatgcctggcctgtgttctcaggcaattctgcagttctcctgtgaacaatagagggcactgatgcttctaatctggcagacatcgcctcggagagaacaaaatcactcttctacttgtggcttgccttccagctagccaacctctcagtaccacattccatttgtgatagactttctctctcctaagaaagctacctcttttctttctctattagttgatattctatgtccagttttcaaagctctgcattaaaaagctgttcttcagttaatagtttgtggtcttttaaaaaaatatctcctggcttttctgattatgaatggctgttcttaaagcatatcttcttaccttactgatcttctttctaaccctatttaaatacaattcattcagagatgatgctacttgctaggatcttggcttaaaaatgaaaactctataggctaggaccctttataaatatatgtcctgacaacctactgtccagtggcatgtatttatcaaatgtcacaaattaatacattgataggcaccaggccaccacccgaagaagaacatactgtgatacagttcttcactaaagagagttatttacctttttttaaaaaaaaactcaaagccataacaatttaaactgtttcacttgaatcaaatgagatgcatcatccatttccctgatgtgctttcagtaaagaagaaaaggcttcataagaaataccttaggagagtgctctgtgtttaaccattttctcaccataaaagttaaaatcacctaatcagaaaacaccctatcattttatactgaatggttcataagaacataaaattccatttagcactgctacccgctctcatcatctacccttttaaaatgcttacccatctttctcattgctattcaaagaaacagatttatttctcaccctggagttgggaattttggcatgccagattgaaaatgtacccaacaccaagtagtggatgggttattcttagtctccttacacgcttaagagaaaatggggcagtgtatgtctctaaatcaagtgaagttctttggaaactatgacttcagctatagctagattagtgaggctgttgtcatattagagaaagaactgggatcatgaacaatagaaatgctagtcacagcaaaagagatgaagggacaaaatcttagggactgtgagaagaggttgcagaattattaccatattcatcatacttctgatttattttaactttggttatggaaattagagaaattcctccagtgcctttttgatgtctctgagcaaccactgacatttggtggggggtattttgcctcagcccagctgtgcaaacccctttcatcatttctctcctgtccctttcatctgccctttcactgcctgcccctccactccctttattcttttccctttttttcctccctgcttaggcatcagggcctgggagccaccagtagacccaaaagacacaagatggctagaatagttcctgtttcttccctgataaagtcaagggaaaaggcctccctagataacctgtcccttcgcttctttcctcaaggtttacaaaataaaaatcagaatcattggtgataacctttcttgtgttttagactgtttatcgtattagatggaagaatattcagctgatatatatatttttttctttttggaagaagctatttccatgctgtggctgagctctctggcagccaacagcgcctttgattagaaggctacttcataaattacaaaccaccagagtgagagtcattatgtagaatgggctctgccatctggtcgtccactctctacacgataaaggccatcatccttgctctgtggcttggttacttcaaggcgtccttagccacagcactgaaagaaaatagatgttttcattctaagctcacttggccttttaaacctagaatattcaagcacttggaagggctattattcccatttaacagattgggaaactgagatgtaaaagagttaagtatttttgtaaaaaatccagtaaaaaaaatgtacaatttttcctttgcttcaatagcaagagagcagattccgcttttctctgctttctagctgtataagaaatttcagatacatttcatttccattttctgaaaggttctatcaatggaaattacgggtgcatgtgacaggagagaatgaatttcttattgaagaggtaggcactctgcaacaattcatctcagctgcctctaaagaacaaaaaataaaagttttttagtgaagttgataaaatgccagacaggaatgaatactttacttttacttatgtttctttcctgaagcaaacaggagaaacatacctccctttacctctggaaagcagttcagaacacactgctagaggtcctattctcttcagaaagaacttctgggcatttgaactaaaactggccaaatcaaagaactgtttagcccagcatggattcagtatgatggtaattactaattgcttgagtctgagacatttctttcttcctatactagggtattttagaacagtagagtgtagtggacatgtattctggaacagtggctgggtcccatccatgcctcttattagctctctggtcttgggccagttagttaactttactgtacttcagtttcttcctccataaaatgggcttagaatagtaactacttcattggactgttgggagaattaaaatagtaaaattgttacagtgattagaacagaactgtttcaagaagaatattttgctgccttctcactattttttttcaatctatcaagattaaaagttatcaaaataaaagaaaggtagatgcagaaccaccagtaagtttataccaggatgatgaggatgatgtctcacttctattaatggaaataatatgtgtggctttgctgtctttgtaacctataagcattaccaattaacatgggcaaatgataaccaaaggcaaaggaccatatatctatatattgatacacacacacacacacacacagagtagtacctgtcattagaacttcctacgcatacataaacatgtttcttgtattcctgtatcgaaagtttcaaactacacactagtgcttatgattacttctttgcaaagatatgacaattcaattggatgctttcaattaatgttcagagagttttgcctggtctgtaatgtcagacacttttcttatcaaagaaggttggaatttatgagacatggcaagagaaaaccatcaaagggtatttttaaagtccatattaatgattactgccaccctccttttaaaaaacagtgaaagaaaatgtcaggaaaggagttcaacaaactaatactgctattgcttatagtttccttttatcttaagtctatgttctgattttaaaaaagttaatatcagaggtgcatttgggctttccacatattttataatagttgtgcaaatacataaaagtgtatatattcttacattcctgtggtatagccctttaacaaagtgtataggtatagtccaaataaacttaaagcatacctaatttcttagctgaaaagccaggaccctttggaagtattaaggattatgtattatgactttgtatcagagtgtcagaaaccctggcttcagatataacaggagggaggaggtggggagtcgtaagaaggaccgggtgtgcatgcattgtctacattttcttcagagcaggaataaaatcagtcaccagtgatctttcatgcaacataaagttggacttcctgggcttgttctgctcagctgtgactccactcagtgttatcaactctgtgtggcatttggttatcctaccattgctgctctcaggccttttgtcagaaaccatgctgattttactgccatttttttcttcccaaaacataagagctttcaaaagtaacttaatgggaagcagctagacattttaaaagagatggaggaaaaacaaaaacccgaaaccttcttccttccaaatattctgaaatataagacccaaaatgaatgtgaccttgacccagcctatacatttcaccaaggggtctaaaccctggggaatcccaggccttccctccagaacacttacacacatactcacatgatatagtgctgtctcaggattaacttttacaaaagaacagaagtatctcgaactttcactctagagtcccgtatctttttcagtatttcctaaaacatttaaattgtgttttcccctctctatcacactgcaaaggtgacagtcaacttttatcattcaacatccttttgggagcatctttccttctgtacccttagttcagatttaccagcaactgttaaaaaatatctgcctaggaactctatataagaaacaatgagtttggcctaagctactgctgtgatgattcacagataatcattcagccgccgggctctatttatatatttatttcagtcactaatttcagattttattccttagtatctaagtcagtacaaccaggcaaaagagaaagaactttttttttttttttttttgccacattttaatctagttgcgtgttgcgtaaaagatttggtgggaaactttgaaagtaatgaatcacatgaactttctcaatgatttgtggatttcactctcaaacgttccttttctatttcaactccattataatggataattgagaactgactacacagatggggaatgcatccatccattcattcaacaaatatttcaagatgatgacagggacatcaaatttgctacatgtaactaggccttcttaaaagaggcagatgatgatagactatggaagaaggagagtatggctttcatgtttatatattttgggtattccatgaacacatttacaaagaacaataaagagaaaggggctgcatagcggatattttataggttccaaagcaattcatgattttatcacatctactgttttctttgaataagatattttaaataaaaactgactttactttttttcaaagcagcaaactggtgaatttttgatgttctgtaatttcctgaattatggttttatattaaatgtcattcctcccagagtggtagcaaattacatgatttgcctttaaagcaaaaattaatttgtgaatttcaagtcatgatttgccttcattccacctagaccaggactctagatcttagagccccccaaactcagctactgtatattgtaaaaaggagcatttggttaaataaatggctaaattatcaaagtgactatatcatatcccgaattatcaattatatacaaactacatactatatagaaaatagctttgttatattcaatagcatattatactgtggttggtgaaaataaaattcctttttactcctattttcttatatttacctcacatggtccccacatataaggaaagaatgacctttttaactcaatccttgctgtcagtccccaaaacccaatctccaaattctgtggagtctcaagtagctgaatcagagcaatcagtagatgtttatagaactgaatcttcttcctttagtgtagaccatcagtggcagaaacaacaagaaacagtatgcatttttatgctaaggatttactttgcaatatatactgtttcaaagttttcaacttcttctattccaggggctatttgtatttgctaatgattgtagttaaatagtgaatactttcctcctggatgaggggtccctattagtagcaatccagagatgttgcctgaccctggcccccctgcacattacagggaatctaaaaaaactaactttcccccagaaacctgaaatagtttggacccaagtagtgtgcattcccaaaatgctgttgtaccccagataaatctagcttcttgctgccagatcttaaggaagcctgtgtactttaattttctcatctgaaaaatgtagatagcatctgctctatctaattcacaggcatgtgtggaaatagatgcaataaaatggaaagccctggcattcaataaaatccattctcttcccaatctcatcaaaaccaaactactgaaaaaaagcaatatataaatattagggttttttctcttctttttgtattctaggatatcagaatgacatgttatggtggacaagttcaaagagtttgggaaatgtgccatttcttggtcctggaataagagaatgatttggggtgggggatcgagaagattattttaaccagccaggcattcctactcatttttctctgcatatcgccacaacttggacacaacaggagcttcaacgagaggaatttgtacttatcagaatcaagaaaatcaggttttttctctctttgacagatatagttctcacaatgggtctcaataaagccttttccccactaggaattgagagatagctcattctagctactttaaaagagaacgaggcagggaaggggagctatgaataagatttccaaagctacagaacttgcaaatatctaaagaggccagtatttacttcaagaaattaaagagcgaaatgttgacactgaaataacagaaagctgaaaatactcttagtactctcattatattctatcatgtaatagaaaagttgtacactttaaatgtgtacaacaattctctatgcaaagaatggtcctcattgggtttgggaatatctttgggatccaacaggaacagcatgtcctagagtagagactgaaaaacattatcacaaataggcccatatctcataactgagatgtctagggtacgcacacccatctccccaagaccaaggtgggagatgccagtatacaagtccttctaaactcattccctctcctcataaaggcatttccacagctcccagaactcctatctcaggttgtcattgcaactttatgcaatgctttgctctaaacaattcactaattcagactgtaaatctttattataaagatttccttctcctaagcagtaattctctctgctctggtggggagaggaatgatttgttttttcgttactggttatttataagatatctactctagattagtcctgcttgagtgacatcctaaatggctcattccccagcagtactctacttctgatgggagactgacaacctctacttagaatgtctttcatggtacacaatgaagtgtaaaactgctgtgaaaaagcccatgtttcaaaacaaaccatctctataataagcacttaaaacacttttcattaatatatttctttgtgtataaaacaaaagcttaatgctgcaacatggcctttgacaatttttttttggcaaaaataaacactatttcagtttttagctagaccaaaataatgaaaatgtaagtgaggcttgtttgagattttacccacatccacactcttaatgctggtgcaaactgtgttgttttcaaccaaaacattaaagttcaacaaaaatccaaaggcaaaaagcttgaagtagtaaatttacaatctaacaacctttctatctcaggtattagcaaatacctatggtctagagagatatagtcctgtctaatccttatctgaatttgcaattaagacttcagagccacagatatctgtacacagttctgtacacagttctgctctcttaattttaaatgactgaacccaaatcaaatcaggcttcaaatacattgaaaagtaaatgtctaatgtctaattgaactaatagatagtactctttaatacagttaatgcttagtgccagatttaggagcccaggagctgcagaaataagagaaatgaacaaataaacagcattaaaaaagaagaggaagaaagaaagaaaatcctccttggaaaacttgtcatgaaattatgatgacttgattccttaatataaatataaaagcaagcaaattcatgttgattctttcctgccatacctcctcctcccgtgatctaaatgtgctctgaattagattcccattcacttccattaattgtcacctccaatagaatattgtaagagcctcaaaatgaagcacttatgagttttctttttcagtctcttgtgggcttctctcagtttatcgcaaatgaacaatcatgttggaagggcctccgtctgtttaatgtcattagcgattgtttcataaaacaaacagccgctccaccattcggctgcagttaatcttaaatctaaatgtggcggcactcagggagagcctcagacgtggtttgttctcaccaatgcaagtctcttaatctattgcaagtcaaggcgcttatctctctgctcagttcagagcagggatttctttgtccaaatactaaaccaaacccagttaacattttgagtccagaatttttttttttaacctcctgggcaattttttttaaagcgactcaaagtctacagtatatttatttgttgactgtactattttacaaatattttcccaatactgagaaagtcaaattctttttcaggttggcgcctacaagccagcctaatcagtgagtttgggaatcctgataaaaggctaaactgagaacaaaaacacatttacagacctgggaatgatgggtacttggaaagtcaaagaattcagggggttatgtactcccaaaagagtctgattacccccataaattaggcttaatcactagtatcttaataataatattattatttagcatagacatggtcttgagtacttactatatattttttttcatggaaacagccaaataacccctaagaaggtattattatccccattttcagataaagtagctaaggctgagagaagtaaagaaacttgcaggaggtcacactgctggtaccatcatttcaaacaaggtctaactggctttgaagcatatgttcctagccataaggccctattaaaactggccatcacaccaatttgaaaatccatgtctataacgatcatatattctgcagttcctgggagagttctaatttgcaagtttttgtacctctgccagataatgtgccccagatttttagtggaaaatattatggttctatgctacagtttctagcagcagaagcctgcctgttgctgctcaggctcagatagcaaaggctgcttcaacaaataactacccagttttgccaccatagcttaacggaggggctctgtccaagttctctgacttagtctccccaggtggaaactttcaggttccagctacagccctgtgtaccccagcaaacctcctaagggtctcctccacccaccacatggttttccccccattcactcaaggcctttaaacctttgcctgctcttctgttgagttcttttttgatttttaaaacccttttgttgtttttcaatttccacctgctcccaaataaaaccaaaagatattggaaggcagaaatcaaaatctgaagctccttacatagtattgagtagccactcagtcagctgataagctggaaaacatttattcattgaatatctgttagtcccaagcactaggtaggcaccaggtatactaatatttgcttcctaatatacctactatactaatagaacaatttttttcttgttctaataatttgttgaagagaatctgaaggtcatacctcattcatatctctctgctctggctttttggaattattttcagctccttagaagggatgaggggacaagcacttttgcctccaagcacttgcacatatgggtcccttagcctagtacattatcatccctctccttacttgcctagttcctgctcaaccttcagatcttagaacacatgtcacttcttcaggggtatgcccccattcactgcatccctaaacggggtaagtgtccctctgattggtttccacggcatccaggattttcccacatcctgtgcatgtcttccacatgtctgtaagcaccatgagggatagggactggtctgtcttgttcaacattgtctccccagcgcaagggaccatgcctggtacagaggtggtgcccaataaatactgcctgcatggatagatgcatagaaaaaaagggtgtgtatcttagaataaattttttttctcataaccaataaaaaaatctcaaattcttttaaaatggagatagaatatttatattctgaagaatatatataagaaaagatatagagaataatataagaatataaataagcatatatatgtgtatatatatatgacaatatacgactatatataataactgatatccatggcctgagattttgctcttttaaaatccaaattgaaaacccagtgtggtagcatgcatctgtagtcccagctactcaggaggctgaggtaggaggatcacttgagctcaggagtttgaggctacagtgagctatgattacaccactgtaatccaggctgggtgacacagggaggtcttttctctaaaaataacataaattaagtaatttaaattgagagggaataaaggacattttgaatggagtttaaaaacatcccagaaaggataaggggaggcttaagcagagggatcagaagaaggagggcatgtacacttttcatgttttgcagttttaaccaggaaaatcactattttattaatatgtacttagaattcaattcagtttaatcaatagtcattgatcgttagctgataggatagacactctactagacattatgaggtggtgggaggtgataaaacatcccagttgtaagaatgtataagcagaggaatagaaaggagggccaagacagcaaagacaggtggacattcctttcaagggctgcaagtctctcgtttgctcagtctcctttgttcatatcggctccatctagcagccccaacccactgttgccccttccaaagtccacctcaacctccccctggggacaggtgttaatgtctaggagagaaaaaaaaggagatatagaaagtgagatctaaattgagatttgcttcctgataaacctactacacaaataaaaaaaaaaaattttcttgttctagaaataaggtgagttttactaccttatacatacttcctttttttttatcaattcctggtatttcctttttgtaaactctagatcttctagagtcagctctgagtaaaatgattatttcctaatttaaacaattaatacaataagtgtactggtcttcagaatcaaacaaggttttgaaaagtggcaaatttcagtaatggaaaccagaaaacaaagtaaaacaatcttacaggtaatcttatatcttgactcagagtaaatatttggtgagtgcataaatgatccataatttcattgtcaccagaagcatctatctcaacaaatctcaaatcagagtggttacaaataatcaaatgggctgacttgggttcactgtattcttcctgtctctgccagtgcctactatctaaagaatacaacaattaaaaacagtaataacagcaacaaggcaatactttgaaaagaagcaaaattaatcttttacctgtattaccaagcattaaaaggctgtgctttctgtattaggcttaaatatgaccacagtttgaaataccttaatacttgtcaagtaatgggaaaattgatatggctcatttacaagtcctttcttcctttccactagtttgtgacttaaggtatacaacttggagctgtccagctcttcaatccattccccagttttcagggaatcagtttcatgctttacaccctgagggtgtatatatagttctccagttgtctgactctcaagtactacgataatggtaccttgtagtggctattaacaataacaatagtcataccaacactttgccaagtgctttagacccattgctttattaattctcacaataacactctaggatgggtgttatattattaaatgcccttttttccttcaaataggcaaaatgaagcttggagggctgtgtaaattgcccaaggctctggagctattaagaatgagcctatttctagaactagaaataccatttgacccagccatcccattactgggtatatacccaaaggactatatatcatgctgctataaagacacatgcacacgtatgtttattgcggcattattcacaatagcaaagacttggaaccaacccaaatgtccaacaatgatagactggattaagaaaatgtggcgcatatacactatggaatactatgcagccataaaaaatgatgagttcatgtcctttgtagggacatggatgaaattggaaatcatcattctcagtaaactatcacaagaacaaaaaaccaaacaccgcatattctcactcataggtgggaattgaacaatgagaacacatggacacaggaaggggaacatcacactctggggactgttgtggggtggggggagtggggagggatagcattgggagatatacctaatgctagatgaggagttagtgggtgcagcacaccagtatggcagatgtatacatatgtaactaacctgcatattgtgcacatgtaccctaaaacttaaagtataataataaaaaataaataaataaataaataaaaagaatgagcaccctgtagtaatagataggctagggagcatttttttctgcaacagttcttaggtctaaaaacttaattcttgagctcaaaacacttccccaaaggaaagggaataccaatataagtgtagaagtaccttacacaaacaaatccctggattattattcatatgaaattctcaagactgtaaatttttgatagcctatgaagcaagcatgtaacaaatgatttttggattaaactcataagttacctaagagtgctaactcctatagaaattttcttttgatcagttcttaccatttataggctaaaaaatcaactaaaaaaatgggttagtgcaggcaagaaggggagacaattatattgggaagctatttacactgggaaatggcattgatgtgagaaaatcagttgagctcatttcctcaattctacattttgggttttctttcttaaatgtattagatatattttcatataatatttaataaaagtgtctggagtgtattttcaggccataacatgttgttgttggctatgaagtctctttaggaggcaccataattttcaataaatcactaagaaaaacagaaactttattatttagaaaaaacaaaaaacaaactcctttgctctcaacggcagtagttatactgattttgaaccctttggttttacaaatcccatttgagttcacactacctaaccagtaaggtgtatcagaggataagtgggagagggagtgtgaggggaaaaaaagagggaggagaatgaaagagaaacctgaaaataaattatcaaagagaaaactggtcacaatattaatatacgcttagcattttgggctaaagtcgattattacctcccctgatattgtaaggttaagttcaattctattttttgatttgcagttgttcttcccagttaaatttactgcaacattaagttgttaaagttttcactgtgcatgggcagtcacatgaagagagcaaaggttttggatcccaacagatgtagaggtggatggatctcagataattacgagctctgggtaaactgctcaatgtttatgatccttggttttgtcatctataaaatggaataataatggcctatgtaggtttgtgattattatctataataaatataaaaacttatgagaatatttagcaccgagtaggtattcaatgtgttacagtcttgaagagaagactaatctggggaaaaaaagtaaataaaattcaggacagattgaaataaatgctgagatagttcaaagcaatgtcttacaaggtatgatacttctgtggctatcggaatctccaggggctcttgttaatcacacaaatttctgtgtctcatctcagatcagaggcagagtctctaggggttggattaaatctgcaaatctgcattttcaacaaactacctaattgattctttttttttctttctctcccccactgccccccttttttaaaattagagattgagtcttgctagtcttgctaggttgcccaggctggactcttttactctttttttttttctgacagggtcttgttttgtcccccaaggtggagtgtagtggcacaatctcagctcactgcaacctctgcctcccaggttcaagcgattctcctgcctcacctcctgagtagctgggattataggtgcacaccaccatgcctggctaatttttgtatttttagtagagatggggtttcaccatgttggccaggctggtctcaaactcctgacctcaagtgatcctcctgcctaggcctcccaaagtgctgggattacaggcatgagacaccatgcccggcccagggggggactcttaactcctggtctcaagcaaacttccctcctcagcctgacaagtagatgggactataggtgtgtgctgcctcactgggacatagttgattgttatgttcactgaaatttgatattttctactagaaagaaaaaaaatttgtatccctaagagatccaacagcgaacagatggctcatttaacctctgatcattccaggagggttgacttacaaagggtctaatttaaagagactaattgcaggggtaggggaacaacagatgctgcaggaacccagggtgaagagcagtggaactagtccacaaggcccaaagtgagaggggtgggtggagtgcagaacttgggagagggagagttgtgtggaacagccgcccttcagggaagcggtgacactcgaccaagtgatacatccagaacaaggcttggtgagggccgggggcagtaatctggagtataaatatcttgttcttactcttcttcttctctccaatctcctactgagttttcccaatggccagagccaagtggaagtgagaaaacccaggagccccattaccaatatttgtcttatttaaggctggagattgtcctggaggggcaggtggaagatgtctggcctggaagagaagggaagggctggaggcaggaagggagaaaacatcacaaataaaacagctcttgaggttgtgaatgactaaaacactattaacaacaataataatgatgataatggctctatttactgaatttttattgtgttctactgctataaggactttctatgcattaagttgttggatgctcacaacagcctgataaggcagccctgtgatcacccctagtcttatagatgagaaacctgaggcagggaaaggttaacttaactgtgcaagtttacagctagctagcaggaagccaaatttatctggacaagtttacctagtttatcaagtttatcaagtcccctgggactgtactgacagttatcctgctctactctctccaaaggcattctctgagggaaggtgggttccatgctgagggaagaaggtgagcaaacaaatagaggacataaaggtgcctggggtgtgaggaaaacatgaaacatgatggtgtagtcagacactaagggatctggagagagacaagaaacccttgaacagccttggagttgctttttttcctactggcagtggggcgttccactgcctgacaaagcttttgaacatgctgttcctataacgtgggtactgagctaatccccggactttagctgaactcgacatgctgaggttgaagacagctttattgttactcacaaatggagtattacggatccctggttctttttcacctttcatttcttgcgactgatgtaactttttgtatcagtagcaatagaaacagaaactcaaaatatctcaaggcagtggaggtaaaaatagaatgtaatagtaaagcaaagcaatcttcgtcacaaatcttgtaaagtgaacctgtcgggttttgatctcttcattcagcatacttgtcctcacggaggtgcactcacatggaaaaactgggacaaaggaacccggtccttattattatgttagtattatgtctctctctttttctccactttcttatgcttaatcaattctcagcccaccacaaagatgaagataactccctgcattggatatttgaatttatagctgctgctgtttggggcactctggagggaggtacaattatgcagagaagacgtatatgtggaggaggagtgaggaaaatgtaaggagagagtgggcgaaaatcatccctgacttttccttgattcttactgatgcccccactcctgccatctttccctctcattctcacagccccagtccaaatttggggattactaagataaaaaaagaaataagaaaactgttcattcatttactggaacttttccaataccatatgaactgctttgggaccgcagcacactcgataggtttcagtgctaaaaaaaaaaatatctcaacactttggaattctgtacctgatttagtgggaaaaccagtgtgatatctgatgtgatggcaacaaatgcttcactacctatcaagaagatgtccttaatttttatcagaagttacaccagagacactgacctattgccagcatttatataaaaagaaagtcagagtctctttagaaggctctaccttatccatcactgatctcaataattctgctctctggggtcagacatgactcagaccaaatgcctctggctgtagatccagtgttctctatccattattcagttagcatagatgttatatatttgattgtggttattacataatctttttctgagctaaagaaatttttcttcccctacaaataaaacctgatgaagctcgaatcatttataaccactgaacttaagaactagaggtgatcttacaatcatataatccaactccctgttctaacaggcaagaaaactgaggtacagtaaagggaaaggcacttgtccaaggtcataataagtagtgaacctgactcaaagtgttcttttttatttgtctcatcatgctgactcagcaaactatccgtagttaacaaggttttcctttctttcctagttactcatatttttgaagttacattggcttctaaaaaaagaaaagaaaggacaaaaaacacacacacacacacgcaaaggagtgggtattggccaaaatttcaaagacactatttctgaaaaataagggcatacagaaagaaagaggggggatttttgagcctacggactcaaatgccatctagatatgttaactgcaatctaatcacctgcaatgtttatcatgggttatggtaacaatgagtttaaagctatttggataacaagatactgagtttttgtcagctacagctccatgatgtctgtaattttcaatatatctcattttggaaacacataagcaatctttaagcctttgattgctactagtacagtttacttaaacagatacaaaacttatacagtgcaaagcagataactgagtaactagagagcagtcacatgcctgtggctatgtgaatgtacaaatggcacaagagaatcctttacacaatttttttcttcaaatgaattttctcattacagtagcttgtatttagtttgggcttcaaaacttaagtatgcatttgctcccaggacgagatgtggggacaaaatgggtagaaaaagtgtggcctattaagaaaagaaggtgatttaaaactgtcagttgctttgttcccaacacaactctttcataagaagacagtaacccattaggaagctatagctgagattattaactaaaataaaatttttaaagtcaaggtgaaaagtcaacaaattctttgcacctacccacattgttggtatgttttattattgaaagtggctggcccattatgtgctaggcattgaacatacattgtctctaaccctcaccaaaatcctgaaaggaaggggttataatcacactttcagttgaggaaatccaggtactattctctgcaaccagactaaggccatagctaacaaggaaaattctattctcaaattgaggaatctgcctctccaaattccaagacatatccttgaactatgctgccctgttatagcatgtaaaacactcatacaccattgagaaagggttgatgtgaaatttcaggagaacaaatgatgctgtaatatcctaatatctatagtttcctcatacaagccctctttaaaaacatttcttggagaaaggataaatcatctttattcattgactgcatataattatcctgtgaggtaaatagatatagatagatctatctatcattatctatctatctatctatctatctatctatctatctatctatctatctatattttagaggcaggatcttactttgtcacccaggctagaatgcagtagcacaatcatagctcactgaagccttgaactcctggtcttaagtgaccctcttgcctcagcctcctcagtagctaggactactggcatgcgccaccacatctggctaattttttaaatattttatacagatgggatctagctctgttgctcaagctggtctcaaactgctggccccaagcaatcctcccttcttggcatcccaaagtgctgggattacaggggtaagccactgtgcccagcctctgtgaggtaaatattatataaataaattcaatatacaaggaagctcaacctcagaaaagtgaatatcttgtctaggattacactctactaagaacaagagtcaggaattaaatcccccccatatatatggtttagagtctatgctgcacccctgtattttaagccttaaaatagaactgacattaagtcacattttaatcataatatacttcaacaaatgcctaatgtatgttattgacatgagaagcatggaatagatgttttaggaaaaggaggccaaaaaaaaaataatgattaaaagattgcctcctgacctcagaagccagcttaggattacttcaggagacaatcaattgattagaatttagcaggagaattgaggagagtgaagaccattatggcagggaatgtttgattaatgtcccaaaataagaatgaacagtataattgcatttcagatgaaagaaagaccagctgcaaacagagtgatcagggattgcttcccaggggtgttctatgaagtagtcattgaataatgggttttcacaaggtattccaggtaggtgggatgacataagtaaccatgaagagaactgaaagagtaaacaaaccaaatttatttaagtatgttggcaaatagtgtgagatgacattgggaaagatcatttaaggtcatcaaaggcctcaacttctaagctaaaactatgggcatagttacaggtcttggtgagccatggaagataatactatgtgaggagaacaatctagtgcatacatgaagccgtcacatgtaagttgaccaggagcatttacatagtcaagaaacagttataagtttacttcaatagagtgagaaaaaatgtgaattctcttctattagaggtaggcacactagccatagggatatggcaagatatgacaaaatcaggaagcaagttaaggacaaattgtcaggaattttcaagtgactgataatagaggtttataaacattgaatttgaaatgctaactggacatctgaattgagattgtactcagaaatatggaaatcacacaaagatatgaggtggtatggaaactatgatattagattactcttgcacagagatggtgggtagacaatattgttaaggaagagaatagagaaattataaagaggaatattaactaaggataagtccacttttcaggaatagaaacaaagagagctaccaaacaaggaaaactgagaagtgaattagggtagggcaaaaagagcaagggaagctaggcaagtgggtgaaagatagatagaaaataccacagacattgagagaaggaaggagaagaaatgagaaacaaaggtcacccaatttggcaataggaaaaccctggtgagtcttttggtgggctaataactggagttcaagggtgcacatcacttaggaaatctggtggtctatagaggggaaaaaaataggactgattcaaaagtaccctgtgatagagatgagtttaactttttataaacacacaggagacttaaacatgtaagaaaaggaagagaccagagagctagttccattgtcctggattcttctgcattaattagcatttattaattgtttactctatagatgtttgcatctcttcaccagtacatatttccagcatgagccaaggccttttagcattgggagatagatcagatatttctttttgctctccacctaacatcagatcagagtagaagatcgatatctttcattgaccatatttctgcatatatatatttctcagacattcaatttttaattgaaagaaaaaaggagtaaataataatgattataacaataaataacaggttaaaatattaagcataatacatgatactttacatgaattatctcatctttttaaaaaaccacattttaagcaacaacaaaaaatacttgattcattgttggattatattttgtacgtaactattcaacatttcctgcccttttttcaaaagctgatagtagattcactgtcaagtccctaccacaatgacctgtctatccgtttatctttccatctatccaaccatgcatccacctgcccacccattcacccatccttccattcattcatttattcattcattcactcattcactaattcatcaaatattcctactccaagctaggtattggatgagataaaacatcagccttgattcaccaattccactttttgtcttgtttttaaagacaggttcttgctatgttgcccaggctgtcctcaaactcctgggctcaagggatcctcctgctccagcctcccaagtagccaggaggccatcatgcacttcaattccactttttaacaaataatctcaaaggcacatttctttgccaaatgaacaaaactatcataattcaattagtggaaatttttaaaataaataacagaagaaaatgatacttgctttttatattagttttattcatctgctaaagatgctcaataatgctttagcacaaatacacatatgcttataacagtatgtaaaaaattcaattggaaaattaaaattaggcacatttctaatttaatgccttataatctttgccatagcatgtatgtacagttatctaataagtaaaatatgtagaacaaggaagaagaacctcgccctaagggaatttataatatattctagtgtattctaatggtgtgtgaaatatacatctaaactcagaatttgtcaaaattttgtaactgggagatgctgacaactatgtccaaatatgcatctaaaagattcctgccatgggaaaaaagcctttatttgatgatgctcatatactgtatttaaaagcttccttatgtactgcaagaacaattaataggcctctacctagaaatattttgaggaagcaatgtggaacagcactgctgtgtttatttactgtactgtggtattatttttcctgtgatagcattagaaatacaggtggtaaatttaattacagtatttttatttttaagtttgtggtgttttttttttttttttttgaaagacatagctaatgaggtaaaaatttaaatatcaaaccccaaagtgtgtggtgaaagtgacactgctgtagtatattattcaggggcctgagttctgatcctagctgtctatgacctgaggtgaacatttaacttctcatagcctctgagacaatctgtttatgaagaggagatggcatcagcataaactgatgggagttctataaagggggcagcttcacacactcaaatacctacaggatccagacaggtacccgacagatttaagcaatacagagtagagggatccatggtgagctgaagaatggaggccccatctaaatgcattcacattcagatctaacaaaaccacagctacacgttgttcacaccaatagtaaaagaaacaagcgaagcatacctgcagtcctcatacagctggctgcaaaatctgcatggactgtgaatttccagtcctaaaacggtggatctatgatgctgagctcccaaaagaactctgctctctctttctctactctaacatcccagaattcagcagctcgggtagaagctgcacatgacaagtttgggaagattcctcaattccacagccttttaaaaacttctagatgtatatcactctacctttaaccaatagctagagcacaatgtgagaaaaacaattgtgacactaacatatgaacactgatgtacctaagctgcttctctaacataagttttcaagctgtcaaaacatattctttgtcattcctcaatacatgagaacagcatcattagcttgaaaggtgtatgttatttaccagtgacctacttcagagagagttaatcttagaaaacaatggcatagtgagttttttgtttgtttgtttgtttgtttgtttttcacttaacaacccattctggctttggaactagattcccaaatagcttagtggatctgacccactgtcagattacccaaagagaggctaagaaatgtacttgggcagctgcaagtcaggagcactagcacatttttttttttttaataagctgatatttggtgtttccaaaaggagaaaaaaaatctttgggggaaaaatcagaactttattgatttcttaaactaccagttagtttgttattgtttttatttggaattacctctagataggagatcaggagatgagcatcccttttaacgctcaacatggcttctaatggtcttagtctgcccttgatctgaccattcgggtaggcagagaagtcaaacaaacaaatcaaggcatgaaagaaatcttaaccaaagaatctcaatcaagtaaaggaaaaaactgaacttaaaatgtgtatgcctttctgtaatattcatagtgaaagatagcgtaaattgtgtttgttttcaagagattggaattagaaaattggatagcttaccaagcagataagggattcaccatggaattcatgcattttgcacacagatatagcttgcttttggtttaaaacttccaccagaaatgcaatgatccaatataagcaacatacagttttctttacttcatggactgccttgatgtagatatggtatcttacttagggaatttatttctgcaccactgatcccactgaagattaccgaacacctttgggatcttcccacttttgaaaaaattgtcaattgtagtcaactatgaaaatgctttgtataagtggtattacatagacttaataagagggacaaaaaagaaaataagaaggtctcagggcttcaataaatatccaaaagatagaaaaacatttacaaatccccaacacatgttctctaaggtctttcatgaagaaaaaggatagagctatcttttatataagggaaaatagtcagacttggatcttttgagaaagcagctgcagatcagcttgttttgaggctacaacagataagatgaacagtggggagtaaaaggtattaataggatcatgcacttttagaaatgagaaggcctttataaatcaggcagtacagcccctgatgggttccttgtcatagataacattctagtcacaatatgcccaaggactgaatagattttatatataagtactagataattataattttattattaaaaatagtaaagtggttactaataccttagagtatgatcttttgtttatataccactgcatttactcttcataacagttctatataaagagcattaaccaccatttaaagatgaatgcgttcacagccatagaggccacatagcttaggagtggaagagctaagatttgaacccaaacatggacttcttgatatcaagaccactgcactagcctcagtgcttccttagagagctcggtcagaacttgtcagtggtaatagaactggtattttggtagctctccctgcctccttaccttctgtagagggaagcctgagaaatcatttaggttcctttcaaggtgatgatttaacccatgtcataagtctgcagcaggggccacagtttagcctgtattagagtgctgctcatgtcatggatgtgaaagcacatgacgttccattacgcagtgcggtgggaggttatgaattgcaaaagcaacatgaaattctaaacttcagtctcctctgtacatcagtcatgctgtgctatcatcatgttactctctcatattatcaatgaaaatctttcttgctcgaccctccaaaactgtctcttctcccccttcaaatataccactgcgtactttcctaaaggcactgtcatgtttcaaagccattgttcataaataaagactttgaagtaaacaaaaaatccttataacatattaatgaaaaggctcaaatgtagcactaaatccacactctgattaaaagcgtgtgaaaactgtgactgtgtacgaacagagtctaaaaaggaatatagaaacaattaattaaggtaataagacagtaagacagtgaataatttcttctttttttttttttaagacagaatcttgctctgtcaaccaggctggagtgctggagtgcagtggcacgagcacagctcactgaagctttggactcccgggcttaagcaatcctcccacctcagcctcttgagtagctgggactacaggtgcacaccaacatgctcggctattttttttttttttaatttttagtagaaacaaggtctcactatattgctcaggctggtctaaaactcctgcactcaagtaatcctcccatctcggccaccccaagtgctaggattataggcgtgagccaccgtgcccagcctcttttcttagtttttaattgttgaatatgatatgtgtattgtagtaaaaatgtgaacatagcaatatcgccctatttccagtttgccatttgccttctgtcacctgttgttcatctatttattgtataacaagagggtttcctgggttctaagatcggcttcttcttggttttcccatgcttattataggaattcactcatttcgtcactttaattatctccataatctttatctctagctcttgagctcttcgaccatataacaagtggcctaatgtatgaaatgacgtgactgttcaataagcacctcaaaagtcatcatctcctccccagaaccattccttttcctgtgtttctcatgttggtgaaccacaccactctattcccaattgctcaaccctgacagcatggagtctttcccacctaaataaaatgtcacatctttttttttttttttttttttttttttttttttttttttttagacagcgtctcacgctgtcgcacaggctggtcatcgcagccttgactttccagactcaggtgatcctctcacttcagcctcccaagtggctgggactataggtgtgcaccaccatgcctagctattttatttatttatttttgtatttttttgtagagatgatgcttcactatgttgcccaggctggtcttgaactcctgggctcaagtaatccgcctttcttggcctcccaaagtgctggggttacagatgtcagctaccgtgccaagctatttttttatacaatatcacccccaatttatcactcttttttctttacccattgccattgtcttaattgaagctactctttcctctcaccaacaccattgcaaaaggcttcctataagtgatttccagtttataatctcaccttgattctctccaacaaaaccagagtgatcactttaaaatggagagctcttcttatcactcctctatgtaaatccctataatagctccctgttacttttagattaagggcacagtgcttaacatgttatacaaggtgctttttggtctggcctgagcctacatttagaatcctttctcactatcaccactcccttccctaccaagcttattaataacaaaccataataatgataatctgtggcttgcagttctcccataataccctgtcctttgcacatacggcaaccactccccactctactcccaacacacattttccctgacttaacctagtgtccttcaggacttttcctcgcctcaaaggctgacttagaggcacctgagttgcatcccgaggtggtcccaaggatcccaaccctagccctgttctagcacttaccacactatcataatcgcctgttcatgggtctgcattccttcactggacttcatactctctgagggttggaactatgtcttattcgccattgtgtccatagcatagttcctagtacagttaattatggaataaaaaaatgctaaatggttacatctaaaggtcaagatccattcaaatattacagtatgttggcatggacaacattccatagaaccatcttcaaatacattggtagtaagggattttatggagttcaggaggtaaaagaatattccatggcttccaagacaatatcacaagagacaaggactaatctcaagaccccccagtcctgatcacattaaagaagaaagtagtgatggtcatggaagccagtgaagggtagcactgaggcaacactagaagtgtggccagatggggacagggacagaagagccacacaccttcacaaccattgggtatagcatgtgctaaggagaggacccaagaagttggaagacaaacgagggcatctctaggcatttttaactgtaggttggactccacacctagtcttctcttaaccttttgaagtgtatctatcagtgttctggatttatcctactctcttcccagtgaggtactactggcatgatccatgggaagggcataattcacagatggggcttgcctacccaggctgtagtcagcagtgacatattttgtgacagctctgtataaaagatgacgctaacataaataaaatgcactgtatattatggggtaacaaaatttaaaagcactacagatctactcctccagcagtgaggagccaagatttcagtctgtgagagatggtgttccgaggcaatgctaagagtctgcctagcagctcctcccattcccaacagtgtccccgcagttgagctgtcagccagcgcaacacgaaaactctctcaacaagagctaatgaagagctgccacagatatttatgatctcatatcacacttccagactgctgtttcactttttattccactcattttgttgaagaggtttttctttgtaatctgttacagatcactgaaaatgatggataagaatcagcaaggggttgtgtaagaaccacagtgctagacttaaatctaagtctgagttttgattcaatcactgaataattacattcctattggatactcaggggaactcagtttcctaatctttaaaatgggcatcttgtctttttcatttctatggtcccaacatctaacacaatgtaatagtcctattgtaagtaatccacattcctttctctctctttcttatacacacacataacacatacacataaatttggcatttacttttctgaatgcaggaatgttttcttaaaaagctgataaattgtttaacttacatatcttatcatggaatgatacaagttctctctattccattatctcttccatgctgacttatgaagacaaccaggcttgctatcaacagtcaaacctagccttgccacctgccttcacctacctggtacctatcactgctaatgatcagaaaagcatcatgctcagattaattaaagagtaagaatctaggagtcatttgagttatctggtctcggatcaatagaaattataaaacagaccaaacagagaaacctgttgaagcttgtataggtgagctttcttgggaagcaagttctgagatttgtgtgctgggggtggggtgttattagagagtgctcctaagaactgagtggggagggaagtagaaaacggcagagggaggagtttaagtgcaatgcagtggatcccgccaggagctccaaagttcaaatgcctcttcagagttgtccttacttgagacaagagagctggtcctttgtacctctacttagatcagtcattagagccttgggagaggcatggataattcctggggagggactcaactgtgaaccatcacttttggtagcagagggaatgaatttcttggtcctggaagaaggtttgaacagcacaccacagtatccactacagaagtgttgtgtcgggccctgacagtcagggtctatagatccctgggtcacttggcagtcaagcagcagtctctaattacctttcttggcccatcgcagaggtcagaagtgggctccctgtgaccctgaagtacttcctgaccaggaagtagtcaacaggccccaacagactatagacacgcaggaggagccatacttttggctgaaatgtattgtacacccactgcaaaattgtactacttgattagaaatagtaagccttcctctacttttgagagccatccagttgggattcaacctatgtggaagaagtatctaacttcattgttccgaaaggaggaaatactaagaaatgaagctcattactaacatctgataaacatactggagatgagacagaaagtaagcttttgaaaagaaacctatctatgcaacaggttctcaggggaacacagtgaatcagcaatgttaacctgaagccatgggcctcttcctcagtcactcatcaactctgttatgtcaatgctgaaacaatgccagaatacagagctgaactgtaaagatcccttccttagtggttattcatattgttttctatctctgttattatgtggaggcttaaactatatatatatatatataattatatatgtaaatataaatatatatttatatatatataaaataaatatatatataattatataaatatatatttatatttataaatataaatatatatttatatttataaatataaatatatatttatatttataaatataaatatatatttatatttataaacattatatttatatttataaacattatatttataaatataaatatatatttatatttataaacataaaatatttatatttatttataaaaatatgtatttatatttaaataactataaatattataaaataaatatttataaatttatttataaaaataaatatttataaatataaatataaatatatatttataaatataaatatatatttatatataaatatatatttataaatataaatataaatatttatatttatatatataattatatattatatataaaatttgtaaatggctagggcaatatcctaatgcagtctgccttagaaaaacttgcactgtttttaaaaagtactggttacagtcttactttttgagttgtaatagatttaaaactattttagcacttcttgctaacaatttagtcacaaatattgaggtaattagaagtatctttgggatcacaaaagggaaggtgtgattcatgtaggcagatgttagaaaaacatattaaaaggttaggatttggtatttggggaatgaccttggacagctggcttatctctctgacactcagtactttcatctgttcaaagggcatcataatgcaccattagattcacattaaaaatcaaacaagatgccatgtataaagtgactagcagccaacatgttctatacacctaagatagaagcatgtttgttagtttcttctgccttgtcttcttctacataaactcattcaggaaattttttaaaggccatgtgcatgtttctatggctgagatctaaaaaaaaagaaaaagaaaagtatgtcaagagggctcatgcaaagaaattgtggctcatgtgccatagccaatgattaaaccttaatacaacttgacagttttaatttttatataaataccaccagggcctatcattcacattatggattccaagcttaacaaatgtaatttaaaaacaacaaagctgcttttaaaggagtactgtcaaagctctgacattttcaaaattgaaaatgctccgtgtataagatttgaaatggaaaacccagcaattcttctctttccctgacagaagttatcaggatggaccctgggaatgcctggagattttttaagttgagttattgatagattggaacaatttctcatggaatcatacatatttagatatggaataagagctagaaattgctgaaatgtactgaacccttacgaaatcagatactgtgtgtacattatctctctgtcacagaaattctgtggctctgttactatcaatatcttcatgttatcaaacagaaaactagagtggagggagatctgaggctctgtgcctttggttccagatgattctcctttaatctatattatctgtataacaaatcacatagagggagtgggttcctacagatgagaaaacagagtccagggaggagaagggattttcgaggacctacagtgagttagtgccaaggcaatgaacagaaccaagttcccagacctgtgtgcattctcacgtgccttatgtcctctctgattgtagccctagcatgagaggttaaaatgtgaaacaaagcttcatatgttcacgacacaactaagtattgtgactctatttaaagatcatttatttatcaacaacatatatggatcctgtacctttctactttggcgctaaattcaactagtataatttcaaaataaataattttgtggtatcatttaatatggttaactaagtgcttatttttaacccaagttaaaattaataagcaatgtcaatctcttatccaaaacaaataagaaatacacctggtttgtgactaataagtatatagaagatgatagtatatattactattttaacatcttcactattggcacaacatattcatgttttcactcaacaaacatttattgagtacttactatgtgacaggcactgtgtgcagtgctaggaatgcatccctgaacaaccaaaataaaaaaaaaaaatcgcttgcctcaatctttgctggagagtaaggccatagagaaatgagataaatgtatttagttttttctttttaagagcagtgttaaaagtagcagataataaataaccacatttgcaagtatctctaaatggccttcaaattcttcccatttctcaacatccaacaatggatttacctgtgtgagcatatgcagaagaggtccatcaacaagtcagtcaacatttacgtaatgtcttctgcactccaatcgctataccaaacataccgtcacagttcaagagagcttatatcttagtggactaattagagcaagtcagaagaagtcagccagcacacacaccacccctggtacctaatgcagaagagaccgcctttacatgagcaaatggtcctctcttcacttctgtctcctttcgtggttacctcagaaagccaagcatgtaatcaggtaagacaaaaaccataggggagtggcaagccttactgtttaactcatttctagacaattcccaagaattattattgtgcaaagtagcaggcagattggccagtttcatatttatgtactgcacagtggtagagagacatgccatgtgcaaatgctggcgatttcaaggtgacaagcctctgattgaaaagtctgaaggtcgataagtttcatttggggttacctggccttgcggtcacctcagctgacaaagaggagatttttagagaataaaccctaataagctttttaaaagctaggcctccctttccaaaataattatgacacaccatttcttccagcttcaaaaaagaaactgatttctcatttctttctgttatttgcaagtcttgtgtgagtaactagctacagaccaattacaaaggccttggctttcaagcaacacacaagagctcttacatacaataaggctggtatatctgccctttaaatcccttttctttttggtccagggacagatttgcacttgttacaggatgactgagtaagtctctcatggcattgccacctgtgagtaatggcatgattccttccttcttggggtgataagtattttctctctgtctctgtctttccctgtatatattaatatctaatttccatattggttatcaaaatgcaggcaaacattttctgctgttacacagagaagatagaggacattttagaaactaaaaaattcaagcctcaatcaccttttaacttattgatctttgtgaaacaatatgcatttttgtaagctgtcttttagctttcttttcttttttaaggttagcacttaacagcagaattgagtcattttcattagaaagaacctttaatgaactagttctttatttaaaagaatgcaagttccactctcaagaatgctataacattttgtcaatagttcagaacaggactaatgatcgtcattaatgaaagcccactgtgagtttgagacctccttttgatttcttttaccaaactgtgggatctagacaaaaatagctttacagtaaacattttccaccttaaaaataaataaaataagcatgctagaggtgacaggaaatgtgtggctgaaaataaaaaatatctcttgtcagttttaataggtattcaatcttttgaatcaatgagaaatttggggagatactgttctccttctcttaaaaaaatcctacttggatgccctctgttcattataaatagcctcatgtgtaattacccagaagatgaaatagagaagaaatgaaataactacaaccttacattcccactcagaagagttagggggcatatcggaatctcacggtggctgggattccatggggcagggggatgatccatataatttgaaaatgcttttcaggtgagaacttagaaattatttccttggtttacctggtcataggtctcaactacattataaatagttccaatatctattcccttagaacaacacatttaccaggagggaccctccacagagtgaccatgtctgagaaaaaggactaatgacaactaccacacatgcgagatgtttgtgagagctatgctactttattagctgcacaattactagcattaatatacatagcaacagtataatctgccttataacacagctccttcagaaattctcttttacagtttcaatttttttatctttaatctttaattaaaataaaaaatagcttaaattactttacctcatcggaaatcacattttctgattgcaactttagtttctgttgtgcatttataaatatatcttctcgtgctaaaagactagttgcttatgtattcggtttcccaacctcacttgggaattgaggtccccaggtgaggttaagctattccctcctcaattggtcacaaattcctgaaggaattcaagtcctcctaggaccctttcttggaccgtgacagtactgcagtaatatctagaatgacaaaactacattagaagggacttcccaaaattcttcccataggactcctacttaagctttgtcctgactcttccgacgttttcaaggctggattcagtctgaaatatttcccattatcgatttacaaaatctcttgcaccctctctcgaagaattagaataaaaagaatactgttgtggtttcaaaatcatattagcttgcacttgtctgcaatatcgatggtttccccatcattttgggtgccatgtacttgctttgcaccatgcctcttgcttttctttcttgatctcttagttaaggcagttcctcctgagcaaattacatttcattcaattaaacaaggccattaaaaacagtgtttggccattcattataccagctaaaatttcttactaccccatattattcctctgagagtttctttttttttatgtcttattttttcctatatccaatgcttagtgttttctcaatattttaacatctttttctcattttccatttctctcctaaagtgtttaaaatatccacgatgttatagttaattgttgtcaagatttttctctttttagataagaatacttttgctttggattaaaataagttatacgcagaggccttcattctactccatagtaattctctatctgagttacttctcatgagtcatagtaaaagaaagaaatccttatatactttatttctatcaacacaacatacacaatctagaatatatgggtaaaagatacatataaagcactagattaagattctgagtttcaatagagaaggaagttcataaaacataacaatttattccagattacctataaacaaatatgtactaatgaatttctctgtggtttcatttacttatcttcatagagttaaagaattataaaacagatgattgtatcaatgttttactgagcacacttaattttttaaaaattactacttggccctagtttcctttcttccttcctcctcccttttgccccaaacccccaacaaaaagcttaccagttggttagtctctgtgttattagttcatggaaatgctagtattatttaacaataaaaataaaaatcacactcaagtgagcactgaattattcatgcactccgattttacataatttgaccatccctctttatattgctatttcagtttctatcactaaacaattctccactaggtctaccttggattcctgtgaacaaggagataacacttgcaaaatgttccctccgagacgatggtctgagctgatgtccaaacatttgcagccaaagcctaaactacgaaaacagcaaggaataccctcagtgcccagaataaaaagtagagtattaacaagacttttttcaaaaaaaaatcaaatttctttagaatttaaaaatctttagtgacacaaaagctagcaatattgaaccatcactggaacagactttgaagactttcattgtcaccctgtatttttattacaagtgcacacagacccaaggcatcatttaaaacacaattaaggcacttaatgtggttttggcattaaaagttactattgggcaatgtcaatctttctctttaggaggagaggagggaaagcagctgagcagggtgtaggaatagacacgcagcttgcaccatcagcaaaatgtcaagcactgcgaggtaagcccttatggtggtcagtattctagacatcacggtgttagggcacagtctgcactggcctgtacctcatacagcaagcccctacctctgagcagtaggaattttgctcagagtgggagggaaaagctattttcagtggcaatatcaagacagaaactgaagaaagcaaaaagagaaagaagactgttatgcaataaaaaccaaacaaccaaaaatggttgtgagaactgcattctccgcaagagaagggtctcctttaaaaaaagaaaatcactgtttgttttttttgctcatttccaaaatataatttttagcaagtcattaacctaagtgacagaagtgtaaactaaacctttgtagcaacattcttcaaatgttcaatgttaagtgtgggaaaggaaaaaaacacagatggaaaatactataatgaactgacatgttctatttaaaaactgtttgtcagccgtagttaagttgacactgtcagcatggcaacaaatcataacattttgcatgttttgctgcatgcttgaagcaaggataacacatcgcacgcctagatcatagtggtgggagtttaggaacagtacaatcaatggaatggaacagaacatgtctatccgctgctccctaaaggtcagccaccagggaagtgcaaaatgtctggtgtgctatttctttgtgtctatcaaagaaaactgctgttcacagtttttaaaatgggatgtgagaggcccaggagtactaagggattctctcttctatattgtttaattgttgcaattcacttagagattcatgtgctgcaaggatgaagacctgcaatagacttccttcccttctggcttcataacaggaggaaaacaaaagccaatgatatttaacagaaattgagagcaaactaaatataatggaatatgatctcaaacgttgaattcatacagaaataaagtaagtacatgtaatggcaaataatttgatttttaaaatgtgtattgagtgacctaccatgtattaagctctggactagtaaatgtggggttaacaccaaagaaataaatttaaaatgtttgctgccctcatggagcaaacaaatacattgagaaagtaaaactaacagaaacacatacacaaactcctacataagataatatagaaaataagcatcaataaagccacatatagtccaaaaacataattttagctaatactaaaggaagctctggataatccataaagcaaataacagaatgcgggctatattacaacgagtacatatgtgctttgcactaatatcatcaaattccagtctgatttctttacagaggcattggagttagccaggtaatatttattgacacacactatctaggcaaaaatacaattatacaatagacgaaatacacactaagtgtctaagactccactttgcacatttaggacacctaaaaaccatctgtgaatgaacttattataagtgacatacataacattttagtacgggcataccttgttttattgcacttcactttacagtgctttgcaaatattgcactttttgcaaatggaaggtttgtggcaacctttcatcaagccagtctatcagtgccatttctccaacagcatgtgttcactttccgtctctgtgtcacatttttgtcattctcataacatttcaaactttaaggtgatctgtgatcggtgatcgttaatgttactgttgtaattgttttggggcaccacgacctgtgcccatacaagccaggaaacttaattgataaacgttgtgtctgtttgaactgctccaactggccattctctggtctctctctctctgtccttggccatccctattctctgagacacaacaatattgaaataaggccatttaaaaaccccaaaaaaggctgggtgcagtggttcacacctgtaatcccagcactttgggagaccaaggtgggcagatcatgaggtcaggagttcgagaccagtctgaccaacatggtgaaaccccatctctactaaaaataaaaaacttagccgggcatggtggcacacacctgtagtcccagctacttgggaggctgaggcaggagaattgcttgaacctgggaggcagaggttgcagtgagagagatgatactactgcactccagcctgggtgacagagcaagactccatcaaaaaaaaaaaaaaaaaaaaaaaaatcccgaaatggcctccaagtgttcaagtgaaaggaagaattgcatgtctttcacttgaaatcaaaagctagaaatggttaagcttagtgaggaaggcatgttgaaaaccaagataggccataagctaggcttcttgcaccaaatggttagccaagttgtgaatgtaaagcaaaagttcttgaagaaaattaaaagtgctattccagtgaacatatgaataataagaacgtgaagcagccttattgctcacatggagaaagtttgagtgcctagatagaagatcaaaccagccaaaacattcccataagccaaagcctaatccagagcaaggtcttaactctcttcaatttccggaaggctgagagaaatgaggaagccgcagaagaaaagttggggctatcacgcattggttcatgaagttcaaagaaagaagtcatcaccataatataaaagtgcaaggtgaagcagcaagtgctgatgtagaagctgcagcaatttatccagaagatctagctaagataatttatgaaggtggctttaaacaacagattttcaatgtagatgaagcagtcttctattggaagaacatgccatctaggacttttatagccaggaaggagaagtcaattcctgacttcaaagctccaaagaacaggcctactctcttgttaggggctaatacagttggtgattttaagttgaagccagtgctcatgtacctttctgaaaatcctagggcccttaagaatgatcctaaatctactcttcctatattctatcagtgcaacaacaaagcctggatgatagcacatctgcctacagcatgatttactgagtactttaagcccactgttgaggccttcttagaaaaagcagaagcaaaatattactgccaattgactatgtactggtcacccaggaggtctgatggagatggacaaggagatgagtgttgtcttcatgtctgccaacacaacatctattctgtagcctatggatcaaggagtaatttcaactttcaggtcattatttaagaaatacattttgtagggctatagctgccatagacagtggttcctctcatgaatatgaccaaagtccataaaatgaaaacctttttgtagaggattcaccattctagatgccattaacagcatttgtaatttatgggaggaggtcaaaatgtcaacattaacaggaatttggaagaacttgattccaattctcatgaatgactttaaggaattcaagacttcagtggagggaggagctgtagttgtggtagaaatagcaagagaattagaaatggagcctgaaagtggaactgaattgctggaatctcaggataaaacttgaatagaggaggagttgcttcttacggatgagtggtttcttgagatggaatctacttcttgtgaaaaggctgtgaacattgtggatatggcaataaaggatttagtatattccataaacttagatgataaagcagcagcagggttggagaggattgactctcattttggcagaagttcttctgtgggtaaaatgctatcaagaagcattgcatgcaacagagaaattattcatgaaagtaagagtcaatcaatgtggcaaacttcattgtcgtcttattttaagaaattgtcatagccaccccaaccttcagcaactgccatgctgatcagtcagcagccatcaacatcaaggcaagactctccaccagcaaaacgtttatgacttggtgaaggctcagatgatcattagcatttttagcaataaaatatttaaaacttaaggcatggatgttacctttttggcattaatgctattgcagcacacttaatagaccacagcatagtataagcataacatttttgaccagtctatgtataaacataatcagtaaatgaaaaaattggtgtgacttgctttactttgctaactgcttgattgacgtggtctggaacagaactagcactatctccgaggtatgcctgtaactgattagattttggaatctaatattttcatttcacaaaggagaaagctaaggtctggagattaagtgccttttctggaactgtagcaaggctgaactagataaacttttagatgcagtattcttcacaatctcacattttctttcactggtagaaatataaaagataaagcctcatataggagaaaggccaccagacttggaagtgtaagatctgtattccagctctttggcaggcactgctactcgtccatcaaaatctgttccaccctgtttcctggacccaaggcaaggctgcacttcccactgtaccagccaggtgggcaatgtgactaagctcctaccaatgaattatgagcaaaagtgcaatttccacttcacttactcaacagaaaatgtcctgacctgaactttgctctctgcccctttccttggttagaatgaccaagaccaatgagaccttcaaagtcatgggttgaagatgacaaaactaccatcaggctggatctcctaaataactgtgaggaacagagctgcctgacaacctgccatagtcacttcagtctgttacatgacagagaaataggcatttatattatttactccacactattttggagactgtcacagaaacttattacccccaggttattcaggtcctgaatctaacactgggtagtatgatgctgtgggaaagtcactcacttcttttgagcccattccccatctgtaaaatggacacaattatatttgctttttttaacctaatggaataaggcataagtcactttataaaatgctttcatacaaacataaaagataaactaatataggagttcaaaggaaagaacaattccttctggctggagtgacaagagatgactaaagagaagaacttgagatgaatcttagtaaggtttggataggatttttaacttgcaaagaggatatgcaaagatggaaaaaatcatggtgtaagattaaaaatatatagtacatttttcagagaatagcagaagagagtttggctatagtagtggaatctggtagaagggtaataggaaataaggctggcaaaataaatttgaggaccagattgtaggcagtaaaaaagacttgaaaataagaataatgaatcatgatcagttgtagtaatttcatcctctttatccatgtttggtagaggacagatatctgcctgagacattgttgtatagaggtgcattgcttggatctgggacagccatcttgtgctcttaatggaaaggccaagacaatcagagagatgccagaacctcaacattgtgaaacagttgaacaaaaatggaagtatttatctccaagatttttgtgataggggaaaatgaaatgcttatttcaacattaattggtatttctgttacttgtagtcaaaagcattctttacttagattaagaagtgtaagcagtgaactctgtatcacagagaacaacatatcagggtgatagaatctgggtattttccccaaccaaatctcatgttgaattgtaatccccagtgctggaagggagcctggtgggagatgtttggatcatgggggcagatacctcatggcttggtactgtcttcacgacagtgagtgagatcgtgcaagatctgatcatttaaaagtgcgtggcacctccttccccgactctcttccctctttctcctgcttgctccatgtgataggcctgctccccctttgccttctgccatgattgcaagcttcctgaggactccccagaagcagatgccactatgcttcctagacagcctgcagaaacatgagccaattaaacttctgttcttataaattacccagtctcaggtatttttttatagcagtgcaggaatgatctaatacacagaggaaagatttgatctctgaaaagattccttggaaatcatcactttaatttctcagacacatgcccttcatcatcaatacattggagccatagaccctcccacactcacaatcacattctaagatatatttacaaaagtaatcttggaattcactttataagtaagaacattttttattattcatagtttgtacttataagcactatcatttttatcataccacttggtgaataaaaattacatattcacaagaaagtcggctagtgaaaatttttggataaaactttagagctaggaaaaaacagaaaaatcaaatagatcttctgcatagttttgcagataaggaaattcagacctagatgctgtactaaataccttgctgaaatcctagaaccaacccttcctttttttcttttcttttccacaaaaattacaattagtcccattgccatcaagtagattttctctttgttctcagaataagaaatataagaaaaattattttaaatctctaagaagaagggttaagttttcctggaattctctataattagtatatcttataaataacatatgcatctaaaatatcaaatttaaagtggaatgttttaataaagcttaaccaaaaggacctacctaagtgcatacataataacaagaagcatgtggtcagcctcattcattatctctgtgacattcatgcatatttgctaaatatctcattttatatcatatcctctatcaggcctttttctccagacctagtcctgtattatgcaagaactagaagtcagtctaagcataagtacagtactaaaagtaataccaacataatttattcttcctgtccctctagctattactctctatatatttccagggttttttttgccaggttaaagcaggggaaggccaggggagacaagatgcttagatacttacagccatcaacgattgcttcaaaaacaactattcagggaaaaaggggaggtaaaagtcaaatctgcctaggcattgtttacatattaaaagtaaagatgaggcagtggcattaggaagaatgcatacaggctctggcatatttccacaaattgaataaatgctatttaatagactactttacatgaaataatttagtcattaagaagagaactatgcagtagaatatgctacttcagtccagattagtaataattttgcaaatgcactcacaaaactttttcttagattattttacaacaaactctgcatgaaatgtagtggcacatgaagaaaaattgcttagctacagttgctttcgatgccataccataggagccatggaggggactcattcaatatagcttttcatgctgttcccatttccattttcataaggcaccatgatcccttagtgaaaagaattgctcctagtctgctgcagataggaatatgatcagtaaccttaaatccctttctttgtaaaatcagaatcatgcaatacagttagaattcagaatttctataaaacaaatttcccagacaggtatctgaggttcctgctccttttggaaaatccatatttatcctctatgtccaccactccatctctaaattttactgcccttttggtcccacagtgttggctaaaatctggatatttctgatcatgcttctttgttgctaatcttggacactgagcaggtcagtatttggatggatgactggggtagtaagcctccaggatttcccccaatgattcccctatcctggtatttatatatttgcataggcccctccaaagttgtaccaggattagtctgtgtgaccaatggaatacagcaggggtgaaggtatgtcacttctgagattaggtcataaaagacactgcaacttctgttttggcctttctttctctgtctctcaggtaatttgctttgggggaagccagctgccatgttgtaagcagccatatgaagagatccatatggtgagaactgagacctccagctacagccacatgagggagcctggaagtggattcccctgccctgtcatatcttcagatgactgcagccctgcccaacaccttgagtgcaacctcatgagagaccttgagacagaaccacccaattaagttactcccaggttcctgactctcagaaactgtataagattatagatatttgttgttttaagctgttaaagttttcaattaatttgttatgtgtcctaatacaaagcaaaaggtactataggtttttgttttgttttgcttttcttctaatttttaagtgacttgaggataggagccacatcttattcatctacaggtttagcagagtgcctaaggacataacagatccaataaccattttctgaatgaatgatcctctccttcctgtttttatcattaaagtaaattcaatgaaaattacacttccagacttctggcttaactaaggattttttttttttttttttaatactgtggtttaacccagagtatatagaagagaaaaaaattctgaaatgagatcacttttcagaaggtccaattttttaaatgctcctaccattaagagttcaatataaatttacaatgagcctcactgagcaatttaggaagccttggccttctgccttataagcattcatgattacaaactaaaacttggcctcaccacctaagacatgacagcatgatgggaaagactaaaggctgacgtaagtgtaaaagaaagaaactcccgtaggtcttgggtttagggagcagtatttacactcattatgagttggggaaaaagttcctaaaggtaagtatcacttggtaacttaaaccgcttggggggaatccgggagtaaataccttctcagtttccataagtgggaactatattctgcagtagcaggagttagttctgatagatacttcatagtatatccatccctccagatccaccaacccccatagtctgataagttcctatcgggaaaacacaggttacataaaggagtaaaataatcccattaccatgtagagaaataaagatgcatccatttggaaacctcttaggagatgcgcttgcttgagctgacatttactaacagagcaacatttcttttttttcccactgactaagcccctttcctagacaatgatctcctctgggagagagttattagaattattactccagagtgttagtgaaaagggttcactgagtagaaagaagaaaagcaaaggttttgctcagcacagttaaagttttaccaaagggaagttcaagttgcatgaatgaaaaggacagcctttcactgggaaataatttccctggattgcacaagctataccttcagggaacatgaaccaggataatctctagccttcttctcttcagggaaagaaaagactcaggaaatgctgtctttcttgtctccaccctaaactagctgacaactaaatacagctcaggaagccaacagccagaatcattttttatttttgtcatctaagaaattcactaaaatattaaaagagaaaagcactgaatggggtggtacaaaaaagggcctcaggttcagttaatttccattccagaaaacaagctttgattcttgcatcacttgacaaagactgcttacttctcaaaaatgtgagtaccgacctgaagacacgaagtaatgtgttctaaagactaaaccttaaactaaccgggctcactggaaaaataaatgaacagctgtgttctttaatgtatatctattttttcattaaaataaacaaatagatgaaaaatacattaaattttattttacttattttattttatggtttttttctttttctttttttttttttttttttgagccagagtctcactttgtcacccaggctggagtgcaatggcgtgatcctggctcactgcaacagcccccttgattcaagcgattctcctgcctcagcctcccgagtaactgggattacaggcatgtgccactgtgcctggctaatttttgtatttttagtagagacatggtttcaccatgttagccaggctggtctcaaactcctgacctcaagtgatccacccgcctcggcctcccaaagtgctgggattacaggtgcacgccactgcacctggcctctaaattttaatatatatatttaaaacatgaatacaattctaggaaaacaaaggcattttaaattttgaatcttcaaattttgatattaagaaggtaaagattgtgatgtctccttcctctcaggaatcatctgtaaaacaaggagacaaaaacagaaatacattctccatctttgatggaaataggagtcacaggtgaacccgaaccatggtatatgaagttgcaaagcagagtgcagggtagtaattgatcaagaggtatacaggaagtgaaccataaacacagaccaaatgggatatcaacaagaagcaggactcttctccccaaaatctcgggcatcatggggcattgcatatcaggtattggtgtagggcaggggcctgtgaggcctggggctgaaaacaagtggggctggctgaaacttggcctcaacatcctccacctacttcctaaaaggcatagcaagcattcttcctccctattttctctttgtaaaaaattagctagagaagttctgataacagaaatagaaggagcagtggggtgaggaagaagcagaggggtgctgtgggacaccctgctgaaaacgagagcattacaggaaagcatgtacacccttaccccacttccccactgggctcccagatgcccttgggcaattgtatatctccaaggcgaacactggaggaccctgctctggagaaaaagaatgttctagagaaaaggcacagagacaccgatattttgggatgccctcaatagcaacaacaacaatagcaaaactggctccctagaagatcaccctgaagtagaaagaacccattcacagttcctatctttgcatctaaggattgctattgtagtgcctcactcttaaatatgaatgaaaccagcatttgagcggcttcttctctgttattaataaatacacagtcttccaaatctttaaaaaagaaaaagtccttcactggcctctactgtttcttctagctttaatccaatttctttccttcttctccctgtctcacttcctgaggaaccttatcttccatcttcctgagctcctggcatctctttaaccctaagttctgattttaccaccagccctctccacactttcttatgctcaaagccagaaacttcttggttgatcttcctgcttctatgacactctttcccagtcacccaagctcaaaatgtcagcatcacttttttaaaaaataaacttcctttatttaatttatttatttatttattttgtcttttttagatgcagtctcaccctgttgcccaggctggagtgcagtggtgcgatctcggctcactacaatttctgcctcccaggttcaagcgattctcctccctcagcctcccgagtagctgggattacaggcgtgtgctgtcacacctggctaatttttgtatttttagtagagacggggtttcaccatgttggtcagcctggtctcgaactcctgacctcatgacccacctgccttggcctttcaaagttctgggattacaggtgtgagccaccgtgcgcggcctcctattgttaacatctcgcattaggatagtacatttgccacaaataacaaaataatattgatacattattattaacaaaactccatactttattcagatcttcttaatgtttacctattcttcttctgtttcaggatcccaccgaggatgaggatgtcatgttacactgagctgctgtaactccttaggcttctcctgaatgtcaccaaataccttctcagtttccataagcgggaactatgttctgcagtaccaggagttagttccgatagctacttcacagtatacccatccctccagatccactaacccacatagtctgataaattcctattaggaaaacacaggttacgtaaaggggggaaaaaaatcccattaccataggattttccttgtttttgatgaccttgatagttctggtcaggtcttttgtagaattcctcaactgagatttgcctgatgttttttgggatcagacaggggttgtgggttttttggggagggagaccacagacctagatgttgttttcatcacatcgtatcaagggtgtatactaccaacatgacttaatactgttgatgctgaccttgatcacctgcttaaggtagtgtttggccagcttctccactgtaaagttactcttttccaccccttattttatattgtacttttagaaggaagtatagctcacacttagggactggggagtcatgttccacctcctatagggcagagtatctatagggattatttggaatttttctcagcatcacttttgacccctcttttgtccttcctcctcaatttgtgcattttcccaaaagtaagcagtatggttagagccagcatcagatcttgtaatgcaaaaccctgattcttttcattgaaccaagagagaaatttaattattcctgggaccttagagcttccatctttccttctttcttttttcttttcttttctttttctctttctcttcctcaacacatacttcttgtctgcaacctcccaggcattgtattagctttagaaacacaacagtaagccaaacagacacagtccctgagggtccaaaggcttgtaatagtgccatccaatttagctagggagtcacagaaggcttccctgaggaggtgaactttaagatctgaatggtaagtatatgaacaaattccactataagtaagagagcattcatgatagaggccctgcatgtgcaaagttctggcatgtgagggagtttggagaggaagcactatagtacagtgaacaagggaaagaggatgaaaaaggcctccagaaagccaggaagggctgcctcctgaaaatcctgcaagctacttatggtcatcaacagcagggcagtgtcatgaccagactggaattttaaatagattgttagaagggaagaatctatataggtagtaagagtggatgtaggatgactggttaggaggcctttgcagaagtccagattgaggtgattgtagcttggctcagagtagggattgtggtgatagagaaaattgaacagatttgacaaatagactgaaatatgtgatcttagctgagtgaactacactctcttaccttagtttcttcatctttacaagcgggataataatacacctacctatggagctgttgtggagtaatgggttaatatatgcaaagcatttaaaccactgcttgactcatattaattgccattaataataccagttaagtgatcatgaataggtatataaatcattgtcacagatttagacctaaatcagctggagaatcaatcccctcactgacaaaatgaagaggcttggctatacaatttccaagaccttctctagccctaaatggttaattttcataaccattattctttgctagaccaagaagactatatgctctgatgtatgctgtccccaaagagcccactcagtaaatgtgactttatcttacttaacctataccattgcaattcctatcagaccctttcaaaaacactgacaaaaggggaagaatattctcttgactcaggaattccgataaacataaaattgatttttcattcctaaacatttcacattcagcagaatttggtctactatttctgttggtttcagaatggtcctgtcttgcttcttcttccatattctaaaagtatttccccagcaagctttatacatcccaagacaccacccacacaaccacaatttaaatgatgattttgattcctcaggataggaggtgacgattataatcactcaagcagggaggcacaatgaagagggacccttgacctccaggagctcacaatttacctgctgaggtaaggttaatccatacaaaagaagactgaatataagaatgtagaagttatgaatggtttctcaattcagactctagatggactggaaagaatgtatacgaaagaaaatgaggaatatgcaatgacagaaagagccaagaacactggcatatataatcacaattaagttttcatatcagtaaaaggtttgcaaaatcttacaaaccaaggggacaaaattttgcttctaccaatcccaggcacatcatacattcataaacacaaactagaaaaagcaaaacagaaacattccaggcacttccacgggactgggtgaatttatctggaatgatagatgcacatgtctcattagtcagtaatttgggattatcacttatgtagccttagaaccatgtaatgttcttgaggaaggggagtctccccctcaaaaaaaccccacatttatttgcaaataaaaatatccttacttattgctgtgagggggagaggaatctcagcactcaaataaaattatgctaaaacaaagaaaagaaacagaaggtgctaaattaagaaatgtagactaaaaattcggttgtaaataagctaacattgcaggtaaatttgaactaataaaacagatgattttactgaaaacttaacacctctcaacacagctgtctgcccagtcaggaaaccattaacatattgtcaccaatgcccccagcacattgatgatatgaattctaaaaacaatccagaacaacaaaaggaatgaaccaccaaggaaccaatggcacatgggctttctcaattgccttttcatggtgtgccactgtacactgaaaaatttgcaaaagcagcaagaacacaggctggacagaaaagggagggaagtggtggacaactttgaaaagcaagtacaaatatttcaaccaacacataagaccgcttaagaaacatctatccaaaatacacagttaataaacagggatatatatagggggttgttaaaaggcacgaaagcatccctttaataatgatgtcataatatacagtactgtattttaataagaaagaaacatcattttctcaaattgaaataacaaggcaggggtccttaattacttttgtgccagaagcttctttgaggatctgatgaaagctggggactttctctgaagaaaactgcatatgctcataaaatttagtactccatttcacagagtttactaactcccatctctgcccattgtcaaactcatccctacatgagttctctgttatcttgtgggttcatgtattaaaggcttataaatccatgagtttataaagtcctgtgctaaagaaacatgcattccgaccttaggataagggtttgaaggtattaacatattaacaaactgaataggaattataagaaacacttcatttaattgattgtgtggtatacaatgatattcattcaatttcacaccaattctttttttaatgttattgtgtatttttaaggcatacaatatgttttgatatacatatagtgaaatggttaccataatggagcaaattaacatatccctcatctcacagttgcccattttttattgattgcaagagcacctaaaatctacatttttagcaaaaattccaaatacaatattattaactgtagtcctcatgttataaattagatgtctagacttgttcatccaacatatctgctatttcagaaaaaagttaattgaatttttttgagatgggatcttgctatgttgtccaggctggactcgaacccctgtcttcaagtaatcctctggccttggcctccacagtagctatggctacaggcatgccagcactcctagttctatatctgccattttgtatcctgtgacctactactacctaccccatttccgacaaccccctgccccctgtccctgttaaccactgtcttattctttatcactctgtattcaacttttctttttcaaagattccacatataagtgagatcatccagtatttacaatgggggcaccaacctacatgctcaccaagagtgtacagcgtttccttttctgcacaccttcgccaacatttcttatctcttgtctttaaggatagccatcctaacaggtgtgagatgatatgtcattgtggtttcgatttgcatctccctaatgattagtgacgttgagtaccttttcatatacctattggtcatttttctgtcctctttgggaaaatgtatattcaggtcctttacccattcttttaaaaattggatggttttcctgctattgagttgtatgagttaccaattcttgataattaggagttgatttctacttcagaggaaatcctgcttatctgtttttccatctggttcctattgcatacatttgaggcatcccattactcaaaaatactctgcagatggaaagcagagaacattttataaaaaggagagacaaaaatgagttcattgtacacttgttagctctggtaatcagttagtttgcttatttattcaatcaacaaaccatgaatactgactatgtgtcagaataatggttaaaaaaagacaatgtcccttcccccaaagagcaaaccatccagtgtagtgactgcagaagcatcaaactaggctgtgatgctatgtggaaagcctgaggggtgctttttttctgtttgaggaagtgtggaaattgagccatatggaggccaagcaagttttacccagggaagagggaatagcaatgcacatcttcccaagaaaatggggcattgggacaaaggaagtgggagaattgtagtttggttgggtcaaactgggtatttttagaagaagcatggcagtaagaaaagtcaaaaaagagagaattcactgagaagtgtctgatattgccaaaagctagcttaaaatatccaataaaagttgtagttggaaaagaaatagaaatgcatgaacaaaatcaaataactatattcaggaccagctacataatttgtggggcccagtgcaaagtgaaaatatcaggcatcttgttgaaacattattcagaatttcaagatggcaacagcagagtagtaaaccaagcacagggcacttctgagcatggggccctgtgtgactgcacaggtgacacatccatgaattctgattgtattagacagaaaatttcagatgtttatgcccatcctttactaccccagttaaatatcccccatttatcaaaatgatgaccaagaagcacttaatatgtgctaagcaccaggctgggaacttaattcacttaattttctcagcaaatctatgagctagatattagtatccccacttatagattataaaaccaaagttaagagaggaaaagcaatactaaaaggaaaagtgattttacatatcttgaagacattccctcaatttctcatgccatgctgttttagtgagtgctcaatcgtcttttggtattttcatttctttctatgggttcgtgtttgcctgggccatgaaagtccagattctgtgacatcagccagggagtttgggctcatattagtaaaaactggagtgagaagggccacatttcaccattccaatgacattaccccacagtgtcccccaacagctttctctggtaagaacgtggggtggatgtggagggaacggaatgctggcacactcagaaatgtcccttttcaatacagacacagttctaaggataaattatacaattaaaatagcacatccacactacacgagtacaaaatctattttaaaataagttattaaatcttcagaatctacagtaatttctgatttccccctgcaaacctccaattaatagtttcttaaaacaaaggctcagtagtgttcagactcttgagtgtcccccgccccatcaccaaatgctgctgaataaccaacatatgaccatcaataaaatccacttttcccacttacagatgagaataagaactgccacaatcacaacggaatattaattcaacagtaagcaccaaagaatctaaatatttactaatatcccttagatttttgtctagacatttttttagcttatttgaacaggacattcctcttacattttggttgggggttttggtggtgtattcagggctctctgtcgagcctctgcctttggtcttagctgtactcacacaatccctgcagctccgagcccttcgtgtgattaatagctctgccagccattcctatttaaaaactattcctactttatgtcttttttttacttgattttctctgatccttgtttttctccccagtaaaaattacccactgttaagagttttattcccactccaaagccttgtaactttattccacatcgttttgttttggggagcttttgttgagtagataatagggcaaagcctactcacattaaacaagtaactggccaaaaggttctaacacaggttaatctgccagtacctctctccctccatctgccctccctttccaaatccacaattttaaggcagaataaaaaaaaaatattcacaccaccaaatggtataccctctcacaccaagcaagcagtacttcccttgatctgtttctgcactggaagtgtaagttgcattttcaaaattattctctcagccctgtgacaatttaattaatttatttatttatccagtttctcaactctgtttaggtagcaatgtctcgtcaatatctcattcaggtgtagcatggaaaagcctaacaaccccgggccggcagccaagcttaccagtgactgacgctcgcttaactgagcaaagatttgctctgcacagagtggggcttgactatacaagaaccagtagtgacagcaaggatgccggctagaatcctaacaaagctacttccaacttgtgctcaggcaagtggaaccaacacttaaactgaatgttaaggggcttcaatcttggtactttttaaaattttttttcatcatttaccttccgaataagccctgggattttagagagaaaacagcacattagcactcttaaatcacaaatccttgtatctttttaaaaggctgttgaagatttattaacttgtaggagcaatcatttaattgcttgcttctgctacaccacacactttttttttttaaatgaccaaattaaacctgctgcacaaatttgtgctttgaagttcatgcaaaaggatcattcctttgagggagtgataaaaagaattgaaatgctctcctttggtacaaatgtccacacataccccccttccccaaccgagataccttcatattacagaagcaaatctttctcctttaaatgtttccaattcattttctaagccaggtcagaatttcattgtcacatttccctctgcaatttcaatgaaagcccatagcatttacaaatagaggaacattgtacttacaattttgggatgtgtaatgcagctgtgtatcttatgaaaaaactgttatgtttatttttgctgtccttcctgttcaaagacaacaccactcttggtatagctgaagaaattagtgagaaacagaaagtcctttccacaccacgaacatgtgaaaactattctttgaatcgagatgtggtggcagtaagtagtctgttgtttgagacttttgtctcttagatcaaattcagcccaaagccaacaagatgatttaacatctaacctcactgaatttggtgacatgcaactgcagaatcaaatatttagactaatttcctacttcaccaataaaaacagtatagacatgaatcggtacacacacaacagtcccctgatttgcacatttgttgagttagctagcaatattccgatgctgtgtgtggataactagacagtgtcagagtgacagagacagtgcatctgggtttttaaagtgctggatgcctcttacttggaaaagagctctgttccattgcatcagacacccagtaacacgataccatgaacctatgtgagcatcacaagtccaggcgggtcacaagtgaaattcccttcgttgccaattgagattgacatgtgctgttgtcataaatatcacactgtccaatttggtcaaattggtggtcttgagaataaacaaaggtacagtctacagtctgtcaaactgaaaggcatttgccgtgctcaagtgttaggcttccgcagtgacaatttgctgaatctctgtctgttagaacactgttttgtaattggaaaaaaaaaaaaaaggattttttttaacctttaggtgttcggttttgttttggctttgtttatttgtttttgtttcagtctgtttgtcaaggcatttaagcccagaatactacaaaaggaaataagtacagcctccctgctagggacataagagtgtatggattctgaaggagagaagatgactagaaggctgttataactccctcagaacccaaacgtggttagctgggaaacagcatttcttcagagccatcctttctttcctctatgggacttggaacctggatgctataattgaaagccagtatataaagcataacacttcagactactgttaacatccagcctcctgcaaggctgcctcctaatagctctgttttctgcctacagtatgtgcaagcaagtggaaccatcacatgccctgcatgctaaaggccgcagcctttgtcttctccaagttctgtctatttcagaggctaacatgcagcaattagtctaattaatgtgaaacaatgagctgtgttaccacttatcaaattgattgttcccctatcaaaacaaaacaggctggctttttgatgtaatttcaagagatgatttgaaatgtcatgttgctgcaagccaattaccttatgactagagtcacggtcaacagaatacataattagcttgagtttgggaaggctgcttactgctagtatgttaattaactgtcttttgtcataaaacaaaaaggttgtacgaaaggttttgaaataggtcttttttatttacatttctttgtgcttatcaacgtgaggcatgacgatgcaaaagaatagaaaattttaattccactacttcaaattaatacccagctgcaaggtcaggcataacgtgcaggctgcaataccattcacctcactctagtcctgccccagtgtattatattacttgtggagttaaattaagtatcgggtaaaactcgaatgtaagaaatactgagcttgaggaaacaaatcccctaatagacttctttggggtctcacatgtttttgtgcatcttgccaggactggacagtgttcggctgccctgggaattacattcaggtgtcagctttcaatcttgaaatttggagagaataaacccatcatcaaatgatgttattgcctttacctcaatatggtagagacagaatgcataatgggcacctgtgggctagtaaaggaatcctatctgtgaggccagggctctgtaactcatctgtagcttcctctcgtatgtgatagcttggcaattccacattcttgattaaggaaccaattctgaatttcttgagctttaatgcattctgggagtagctaccatcagtaactgacaattaacaatcaagtccatggcagacttacgccatggtttgacatgaatattagcaaactagcttctggtttggagaacaatttggaagtccctcgaagtctaatacaattgttccaccgtcgaatggcatcctttcacccgcaaagacggttgggagaggttctcttggggatctcataattgtctatgagaaatgtgttaccattttgtgggtgcttaaaaacccttcaatttttctctggatgtggttcaggtctgatagtcatattagaaagttgatcaagagtctgagaaaaacatatcacattgctatttttggatcagtttaatttacaaactagactttctgttctaacttgtttccatctttcaacatagtttcttttatttctgatataattaaaatccttaaaatatgatatggaaaatattaaataaagggggcaatgttttttcttttggaatatgggtttctcattttggtaatgcagggtaaagaaccttgaggtacagatatctgacagaaaggaggcagatctcagctgtgttagacgggagagaacagtaagtttccggtattctcttaatctctttgcagcagattctctaccctttgccaataaaaaaaaaaaatcatgaattgtaattatggtctttacagggagtagatgggtgaaagagaaccaagatgaggatggctatctaagaagcctggctcattaaatagtattaatgctaaccattgctgagtgctttcttggtgccaagtatagtactagtccctttctacatttcagacaaaccacaaagcccaatagagtcatgggcttagtatgtgaggtagctaacaacaaaagaaatgtgctaatttcacagctgggcatggagactctagtgtgtctgacacactcctgttttggaatcaaaaggtcttagaaccctatagttgagtgaaatcttagagacatacttaacctccgttccagtgtggaattctttctatactggccctgacagattgaattgagactcctttcagggaggggtctctttgatggaatttggagaaacatccaaatatgctccaaaagtttttggattcgtgctgataagaaaatgtagaattcttgatgtttggttgctattatattactgtaaagctaaggcagagctcatagataacatgaggtgctacacttctgaacttgggttacttggaaggacaagacaaaatccatgtaaaaaggcttggctgaataaaagtcctgtctgaacgagagtcttgggtaagtctcaatgagagagcatcaatgaatctaaaatttatttatatatgtatttacgtatgtatttattgagacaagctctgtcatccaggctgcagtacagtggcatgctcatgtctcacagcagtctcaacctcccaggtttaagcaatcctctcacttcagcctcccaagcagctgagactacaggcaggtgtcactccaccggctaatttttgtattttttgtagatggggttttgccatgttgcccaggctagtcttgaactcctgggctcaagctatctgcctacctcagcctcccaaggtgctgagattacagacatgaaccaccatgcctggcctgaatataaaattttaaatgtggggactataacatcaggtttgatcataaacaagtgcaaaggtttacttgtaatattatttgctcccagctcaggtcccaatttgaccattcctcagttgataaaaatcattaagcagaacatcaagtttcatatgatataattctgtcaaagaattttcctcctatttttttctttttttttctcaaatgggaaagaaagaagaaaagagttaaaagggaaggaaagaaaggagggagagaagaaactgttaagtcactattagttgccaggcactgtgctagcttacatgtctatgtactttcgtacagggtgctacgctaaatttttgtactacctcatcaagttctcatagcaaccctgcaaggtgtgtactatttttccaactatatctttttgccaatgttagtgataagtcaagaagccttagaaaggacaattaagccaaggctctgaaactaactttgactctaaaattctactccttccaaatgcacaaggctgtttggtgtttttattgttgttttaaaattttattgtaaaagctgaactgaacaagggtctgactgcttttttacagtaaaaaaaaaaaaaaaaaaaaaaccccatgagaacacctccaattgtcatcattaaaaatggaacaaaatgaattggggacaatagctagctccatcctatgaagcagtatgatgagttacatttctatcatttgaggtcttgaggatgagggatttaaggaatgctgagtgatagcaacatttttatgctgaattccaaatgctttcctgaaatttaagaacattttaagacaaatcagtgtgtttagaaaacaaggtattttgttatgttgttctccataaaacctaaaattcctcagaaatgttttcttcagttttaagcaaaccttgaacatgtgcagaaaacaatactcaacggaaagcaacgtcttcaccagcccatctaacaggtgggcccctcaagccaacaggactgttgccgctcttactgcagacgtaagggtagaggagggctctctggaaggaccaggatgtggcacagctaaggggcatgaaatgagctgtcctcataggcacattcttgaaatggcagtcaggcacttggctcgcctctaccaccttgcacagagctaaacatctctttatgtcagaacaaattgagcaagcctcaaatcttttttcttttctctgacatcaatgagatgagtgcataagctcagggaatgaatgaggaagagagagacagaaagggggaggaaaaaaggacagttcagttcacatgaaagcactatgacacagctacacacctgcaaactgttcctaggagctcttagaatcttttatgagtggtggtggcgaaaacagagaagcagcagggccaaatcaccactttcctgcactcagatcaccaggactcaagttctttccccacacctgcaccagacacttcaagacatgcctccatgcctttgcgcaaatggcagaaacgcttggcccttttttctatgccatctattccttttgctcttgcttacaacctgcttatctatgttcagagcatgcagcattataaattaatccttacatgatttcacagtggcatatatgtcagtgtttctgtatgttaagtctcaaagaaaatgtaaaagtccagaaagtatccagctgggaagatggcaagacagtacacaaggggaggagacacaatgttagagaacagctggaaagcctcaaaatatatctgataaaaagacagtggtatacagaatgtggtggtcaagtaatagaaggcagaatatatatattatatatattataaattatatatataatatatatatctccatgatattctatatggtatatagtttatatataaaatctgccttccaagtattgctttttggaaagtagagctaattcttaaacaaaaatggatgtgtgtgtgtgtgtgtgtatgatatacacatgtatatatataactctatgatatatataactatgatatatatacatgtatatttaactaatatatataactatgatatatatacatatatataactctatgatatgtgtgtatatatgtacatatatataacgttatgatatacatatacatatatccatttttaagtagcctcgctttccaaaaagcaatatatttaggaacagaccaatagaagaggcatagagaaactaaaatgtaacctgcctttatgcacagccctgatcataccagatcactgggcactgttttgagaggcaaaaataaatttcagaaactaaagagaataacaatgagtaaaatactggattactggatttagcacaaatatgaagaatgtgaattctacaaagatttcctttttaaataagagatgatggttgctcttgaggaaatgtttggtatgggagaagataggacctatcaaataagatgagataatataaatatttcatttagtcgttatcatctctttatgatgatgagaagacattattaccatattttttattctaactcataaaaaatggtctatcgtccacatttgtaatgggctacagcacactaatcttagtttggcataaagctcatacaaaccactcaatattttcaatataaatgtaatgacttctgattttagggaaacataacaatgctcaaaaaaaatcactcattaactctaacctctcctattggtcatttatgtaagtacgcgcacttgcaaaaaataaaataaactttctgcatattcattatgaagaagacggatgacaatcagtaggagagacagcaaatttcttcttgaggattaggctccaattggttgaatttcaacatcaacctggcaattttactattaagtcagcagaagtgagttcttatacactacgccacttactaccggagaacatcaggcaaagggaaaagaacacgctagaataaattgtgcattatttctggcattagttaaaggaacagagcattataagaaaaaaatacagtaccattgatttttacaggtgtttaatacagataagctgaaaaaagggtttccattttaagcctagtgatggctaaagatgcattcaaatatgttcaaaagcaatctaaagtcttataaaatggtgtttaagctattcaggcaaaacgtaaatagtttttgtcatagtactgaggaatgtagaacaaaagcagtgtccaaggagctgactctggcacacggccggccactgtcaaatcagggaggtcattaaaacagaggtaatactgtttatccattatatgatcaaaggttatttagggaaaacagtaacagactgtccttagaaaggtaggaggcataattaccctggaaatctccaagtcccactctccagagaagataccaaaagaaacaattacgttaaagagtcaaacatatgcttaaagagttactatataaaataagtaaatccttgatttttttaaccttgtctgtttttaacatatttctttaaagctcaatttgaaagaatagggaaatttttgcttttattgaacaaccataagtagatatacattgaactgctttgcaaaaaccaaatttaaaaataaggttatatctgcacaaccactcaatgggtaatttttctatttacttatttcggggagtcccttggtctccaatttctgcagagctgtgtgttcatgtagtagattgcataatgaacatggcaaaaaaaaagaataactatttttgaccacacagacatagcactcatagatgctataagaatataggtttgtttttggcattcttcactatatactaggttttgtcttcctctctttagcaatcagtctttctttcttagaaataaatttggtaactctggctcaaatataaattcaatttctatgatttccagctcttgctcatctttttaatccaccctgttttctccatgaccttggccagatactcatttctctttctcattactactgtgatcatatccttactgatggtatagtacatcctcttgaataaacatccaagaagaactcattgttgcccaaagtccctcaggtcagttgaccaaaaaacatgaatttagggtctattttctatgccatatagcaatgaggatagggctgatataaatgaggacagaaggggttccatatacaaaaatatcaggctccataacaagtattggaataattacaaaacatgatgttaactgagacaaaagaatgctgtgcagctgaacagctgaatgctgtggagtacaagctagaggagtaactagaattaagctggatgcagttgctacacagatgcccagtcactaacagatctcgtgagctgtgatggctgattcatgttctggaaatgctagagtagaaaacccacgactcagatacattcgtctgttaaacacgtgatatgatcagctacaagtcagagcacctcaagtcataaccttgccaagcctggttagtgataattctggacactaagtggctcagctgtgaccctctgtgtgtctcagagtttccatatgggaaatgtcatgggactcttttgagttataaaggacatgtaaaggaagactttgtggtatcagtaacttaataatattcaggaatctcgttatacttgtaatattatggaacttagttataatgggtcatggagtatgtcccaactcagaggatatcgaatctgtataatacagatttataactagtatctattttaattctacataggttgggtgatagggtggcaagaacatatatttttttgaagccagaaaattaagattcaattcttcgcttgaccaatggtgagcaatgtttggaagtcatttaagtccatctgtggcttgtctgtaaagtggtgaaatagtaaaacctgcctttttcagggatgtcatagtgaagctcagacaggtggatatgcatgaaagtgatcataagtgcctgcacactatacacacataattgttattcttctttccctagatttgtactacaaagtcctgcttatgtcggggggacatcactcagaaaacacactcattcccctaggaaagaattcttaccactcttgtgaatttgaggaatagtatctcagttgcattaactggtgtttattaatgtattatgagcctctgctgtggcatctgattcacaataaagagattaagcatgctaatttgtcatttattttccaatgcctgctttcctgcctgcagcaccactaatatcccaggagctcctcaacccaattatttcccattttgcattactgctgaaagtagtgctaatgtgcccaaaaggcttaagtccttggtcatgggaaaaaaaaaaatgatgcttctctccccaccacaatgctattgtcatttgctgagaagaaacacccctggaccactgggccatatctagtaatcaaaccaaattagcagcctgactgcactgtggacatgagcagcagacctgtgcttatttagtatttatttttggggtggaagagaattccatctgtagaatgaaattcacaacctacagggagttgaattatacgatggttatataaacagttttgtttgcttgtttggggaattgctggtcaaaatcactcaaataactggtgaactcaactttttcatctcaaaaaattaataagcagttgtttagccaaatccaaatattaacttgcaaactaatttgtgaatacagacacaactcattattaatagaagcagcataaagatttctcattttctatgcttttaaatccagccttataaatgttttttaacctaaccatgtaatatttctgctaccttcctcagtctttcactttgaaatgcgctttttgctcatcccaggagtttctgtattgcttgaggcaaaatactccagcacaccttcacaactataaactgtaaacatttctctgcctttttctgtccaaggctcagagcccgtttaaatgtcggtggatagtttcagaaacatactagactccacagttgccaaaaataattattgtcaaaacttgccaatttccccaagaacgtaaaacttatatttttaaaatttgataattttagctgtgaggagatactgattgaaaacagattgttatttatttcaaagatgttcagcaccaaagatgagatgcagcagattaagttaatctctatgaggttatttcttaccattattttcttaaatcctcccctcactttaatcaagaataggaatgttaagggcttgacgcagggaagaagcatagattagcggttagcataatagcatgaaagccaggaaatgtgaaatctattctgggccaagtggtcttaggtgagcacattatttacagcctcagtttctccatatataaaaccaaaagcattgcacacactgaaaatgagagcttcactgtgctgacattgttcagtgctgactatgtgccaggcaccatgctcagggctttaaaaggattaccttgtacaatgttagtatctacttcttagtagataatattatcatccaaagtttacaaataaggtaactgaggtacagagacattaagtaaatggccacacagctgggagccaactgaggaggctgagctctaacccacagacaacactgccctctaaattgttggtttggcattatctggaagggctttgtggagtgggatatgctacacacctaatccagaaaatttccagaatagtggcccagatttttctctctccttttggggctctgtgccacctgccctgggaaaaagaccacccgggctcaggcctccctggcttggctgcacctggtagcccccacatactgcagttgcgacacaacagtgctttatctgccaactgaacccgagacatttgtgttcggttcagcgcagctggtggagggaggctcagatttccgccgcactgaacacaatgaagcagccctgtcacaggaccattacgaaagcacatgctccctggctaatttttgtagcataagggtgtagactatttaaaactattccccgcccccagctcttaaatgcctgcctaggagtcaagttcatccaggggtctattggccatatgttatttggtgtcacttgtttttctgcatattggggaacacacacacacacaggaagtggcttccagaggaaaatgtttatgattgctggcagcctggataccaaatggctcacatgcaaagtgtaaaggaacaacgctgcagctcctctgctcaaacctggtgtctgtaggaaaagccaacttgaacttgacttgcacagatgctaaagaaatacctctttcactaccagcattcatcgtgggtcatcagagttaactcgccgaaatgggagcaaaggtttaaaggtcttatcacatcacatcctggagtactgtatggaacatggtttcaaaatatatcacattcatgggtgttcattacaaaccgtggtcatttaataacacatctcataattgtggacttaataggagctattaaaaatgataagtatgtgaggtaatacacatgttaattagctcaatttaaccatcccacaatgtacacatatttcaaaacatgttgtgcccaataaatatatacaatttttatttgtcaatttaaaaaaaagagccactgatcttcacattccatgatgttggttaaacagtgaatactaacataatgccttttgtggctaggccaaaagcaaataagcattaagctacagtaaaagaatcacactctaagaaacacacccgagtactttaacatatctggaatagagttgcaaatggtgcatgcctaagtttcctgaaattcaagagttttgacatgcagttgctagatcaatatttgcacatttaaaagatctaaactgagttaagagatgctttgtatccactaaaatctcattgaagggaagagaaataaacgaatcatacatacgacttttaagatgttttgaaacaagtccccctaaaaagaaggctttcaaagaaggcaaacattgaagatttgctaataaagaaaaatatcttcccaaataagtgattcaaacaatgtggggcatctatcacggtttcattatcctactcaaggtttagagaaaacattccttaaactttcagtaaccagatattctcattagaaaacactgaccgccttctttcaaatatcacaaccaaatttaaacaattttgtaggaaagcatcaaagagtgcaaaccattgttattaaagaaagaaaatgataaaaaaaaaaaaacacaggttttgtgggtcaatatggagcagactttcttaaaaggcgaaatattttggcaaaacttaccctaaacacacattcaaataatgtctggaagttgtgaaaagaccctaggaaatgaactcttctcctttctacaaatattgagaaaagagctaccagatgcaaatgaactgctgaactcaatctgtggtcttaaaaatgtatttcaatagaatagccaatgtatcatctgagtatgaaaaagatgtaccataatagcattctgaaaaatgaattaggaacacattgtcatcaactccaggaaaaataataaaggtagaaaagattaagaggcaagcatatctttcggaattgtaaaatgggtttataggtcttctaataacaacttttactcaaaccttacataaataggcttagatgatacaaatattatgtgggctgtgtggacactcccaggttcctaatcatgtttagggattactcgacagaacagagacatttcattcctattgggccgagggattacagcaaagaaacatctaatattccattttttaatttcatgcattttttatttacctttaatgatgctgtatatattcatcatcctgaaatattaaaacagtatgaaaaaagtaataaattggtggaaaatttagggaataggaatgcaacagcacgcaaatcatacactatcaagtgcttgatacacatttaaaattactgcctactacggcaaagccaaattcctagcagatttctgaagcacaaagtcacaataagaagatcagcagaacagactgaaataatagaatattcatccctctaatccatatgcaattcttcagggcttttttttttaacaatgcatatgaggtctgactgtattcgggatttaaataagttgtctccttcttgctcctctctatttttgtaaaaagaaaaaactatatacagttatcatttctgcactgctgcaccaacaatgacagggttagcacatttcctcacacctcaaatgaaacaatagcatttttaaacaacaaaagtgttaaaaaggaatacatttattcatcccactaaaacctcctgaaacagctttttgggaagaagaaaagttgtcattattgatggggggaaatgaagtgacgttttttgtcatttcattaccaatgaatggattgatactataatataatattgcatttaaatactgagaagagctaaggttggcattttatttttgcttcactcaccttcccttgcagggagatgagagtgcctatcaggcattattcaatattgtaacaaggactagaaaattgtagaggaataaggaaccatcatctggtttggcatgggcacttctggagggcacttgacactctaggaaaaagaaacggcacactggtcatcagatgccctgttcaacaagatgcctggcatggtcctcatcctcttagctcatgccctcattgccaagaattagcagctatcttccagtggctgctgtgggtttctttttttttttccttcaactttcattttaagttccagggtacatgtgcaggatatgcaggtttgttatatagacaaatgtgtgccatggtggtttgctgcatagatcatcccatcacccaggtattaagcccagcaactattagctattcttccagatgctctcacttcctcccttccacctaccgcagcccccagtgtgtgttgttcccccgatgtgtccatgtgttctcatcactcagctcccacttataagtgagatcatgtggtgtttgattttctgttcctgtgttagtttcctgaggataacagcttccaggtctatccatgtcccggcaaaggacatgatctcattcttttctatggctgcatagtattccatggtgtatatataccacattttctttattcagtttatcattgatagcatttgggttgatttcatgtctttgctattgtgaatagtgctgcagtggacatacgtgtacatatatctttataataaaatgattcatattcctttaggtcaaatggtatttctgcctctagatctttaaggaattgtcacactgtcttccacaatggttgaactggtttacactcccaccaacagtgtaaaagtgtttctttttctccacaaccacaactcgccagcatctgttgttctttcggtttgtttgcatatgcttatttctttcattaatgaccctttattgtctcacaacaaggaggaaaaccaacaaaacaaaaactacttcaaatccttcctattctttaaagttttctgtatatcttcttccttttttaagcgactttcttttccattcacccaaaagcattgatccctactttgtgctaatgttaacagcaaatttcttatggcccaaatcacatttcacttcatggaatggtcctttgccatataagcatgtcttttacgggattaagtcctttcagggcaaaggctgagtctttttttccattattttctctcctgcaatactgatcacagttctttgtactttgtgggtatttagtacttttttttttgtcattgtcattgaattgatggaagctagttaaatgttttattttggctatgttcagtgtttttcagttcactattcaaattagacaattctaccagttgtggacatggtttgttaatattaataatcctaagcagagggatgtaacaccattttagaaaataaagtggagaaaaccagcctgttttcccacctaaaacactgaccctaacagaaaagagtacacagctttgtagaacaatggaaatgtttacagggtatggagcagaccaaaacaatacaactgtagaaataaaaattcccattattgccaagtaatagagagacatgtaactcttcaaaggggcatatggcagaggagagaagaagcgttcatcattccatttaggggagaaaataagcgtttctttacagagagagatctcactacatccaaatttaataagtataaaaacatagcctggtaagattttaaataaaaagaaaaattttaaggaagttctcatattccagacttttgtcatttgtgtagcagtgatgtgcaccattttcattcaacactcacaatacataatacatttcagagtcgagataaactgagaattcagttttcttccttctattctttattgaatgttttaagtttattcttacattcccctttaaagacatgaaatagcttgagaaaaaaatattcaaaatatggagtgatgaatggcaagaagaaaagagaaacaactcataaagggttatgtaaattgtaggaaaaatcaaacataatgtctttgacattccctctgccttatgtcagagcaaactcctcaattctgatcatgacacagtgatcttatctacgacatgatatcatctttttttttcagttcaaattcccatgccagtaagcctttcgactctaggcactcattcaaaaattcaggagtgttctcaagttcttgtgtgaaccaagatgtgtcaacccacagcaggtggttcagctgctctgagattctttgctgagtatatccagcctttggctaaagcctctaacaaacaatacattgctttgcaattagccacccgttcttattagggttaataaattacctgctatttataactgtagacaacaggtcaagggtgtcacatatgatggggcagagaaagtagtaaaagtttgctaacctttaaattctataccaaacaccaactccattcatgaaggcttgtcttccctttcctatgaaagcattccttctcttgtctacttatcctctttatggttgcacgaactttgctttccctgcctttgtggactgatcatattttattggactttttgaaaatatttctagaacaggaataaactacattacgaagttttcagagcctgacctagttttatagattcagctgcatgtgtgttaatgtatttaaaaaaaacaaagtctgagctaataagaatacatagggttaggccaagtgacataaacagttggaaagagaagccattggtaactacggttgtcaccgctcttaccttacttgctccctccttccaggacaaatgtgtccatttaccctcactaggacgtgcagtttcccaccttccagaccatactttccctgttttgcggtctctatttagtgggattttctatttgctgggaaatattctaaatattttacccatcccactgaaccatttgaaattgtgggggtttatttgtggggatcttaatggttaaatattaaaaattcctaggccaagcacggtggctcctgtctgtaatcccagggctttgtggggccaaggtgggaggatcactttagcccaggagtttgagagcagccttggcaacatagtgagaccctgtctctataaaaatgtataaattagccgggtgtagtggcctattcccgtagtcccagctactcaggaggctgaggtgagaggacggcttgtgcccaggagtttgaggttggaatgagccatgataacagcactgcactccagcctgggcgacagaacaagaacctgcctcaggaaaaataaataaataaataaataaataaataaataaataaataaataaataaataaaatttaatttaaaaaacaataagaacatttaaaaaattttaaaaatgaaatttccttatgattcaacctaatgcctatctcacttgtgtcttacagtgctattttctggtggatagtattatagtgcagtgtcacacaactactcacatacaaaagctgggctttaaaactggctctacgtgggttcaaagcttgggatgctgacctccatattctgatgtccctaggtaactctccattgcctggccaagcagaaggggggttagatctttgtcacaaacgtattcatcttttaagtatttggtaactctgacatgataaatcacagtatctcagattgggaccttctacatttctctataaagatggagatgtatttttcttttagagttgtatgaaatgaaataatttgatggtgaatttcaacctctgcatagaaatgtactgtgcccagcctacatgtaaatatgcagctctgtccaagtagctgttctaaaagtcactgttgcaaaatgcgatttcattaagaaataaataccgatactctctaattaaagtctgaatagataataatctatacaaaatagctaacagttggaggaaatcaattaccaaacccagctgaaaaactaaaactgtctcaactgtaaaagagatgaccaacaaccaaagaaaatttatctcttgaaaacaaataatggcatcaaggttgtcattgtacttcttaacaaaaatgctcacaaatcaataaatttaaagaaggaatcatggccttaaagtggtaaatatgtttcccagtcctcctctccaaggcaaatccattggcacacacctgttgttatgtaacaaagtgaattaggcaggtgtgtggaaggcttatctttaagtcatcaaggatttctgctactcctgagtctcaggttccttcatttgtttatataaatgggccaatagctgttgaaacacttcagagcacttaactaaagcaaacaaagctcttgaactttaaatatccaacaagagaagctattgacaagtaggactttacttagcaaatctcagtattatttggaaccttaatacaatcttacagattgataaggaagccatacaacccagatgcttatcttcatttagattccacatagaagacactgtactaattttagacaaggttccaaaaacaatgctcccatctaatagttttgctttgttttcttttttaatttttattgttgagattgaagatgagtttacccaattagaaaagggaaagaatgtcttcgacttgtagcttagccttccagctctcctatttcctcccaaactgaaaggtatttcagaaagctatcctgtgatgagaaccttcgactaacatctcggtgccggatttcatctcaatattcccaatatctgaaagaatttgcatgagtcacagacccttcctaagctccaaagtcttgaatctgtaagagaagggagtaagactggatgcaaagacctctttcaactctaatagataattattttactatttaatgtatttacaatgatgaaatcaattgattgttttatactgatagctagagaaagaggccacagtactgttgtatataaggttgcataaaatattctcaagtgaaactaatggattctttgttttgttttctttgtgtttaggaagaaaatatctgtgtttctttggagattggtattgcagtggtgtggagatgctgggtttcattcttcctttggaatttcataatcttactttagttactgcttggatatgggtttccttttggcactaaaaggaaaaacacaagagaaaactcattcttttttaaaaatttaaatcacttaactttatttccattttcctttctaggctgacaaacacattgaattctagcttgtctcaactttcaggttttctaattcgacagaactgtttatcttctcatttcagacttaatagagccacccatttctgataggaatgcaagctttctttacaagatgcaaggcattagactaaaatagtttctcaggaaaatttcaaaacttctactggctcctggcctatgattttataacttatagtgcagaaaggattaaagccatattcacatccttagctactgactgactgcctttcattgcaatgaaagggaagtctgttttgtatatacccttcacaaaatggacatggctgagctctacagtacttgagggcaggttccaactacaatgcattcttcttatttatctttttttctgatataatcaccagtaatgatgaagcaaagtccagaaaatctgtaaaatgactttctttcccctacatttcctagggccgcattagggagcaacgcccaacatcttttcaagtgtcttgctgtgttttaagttattttattaggctgggcacggtggctcatgcctgtaatcccagcactttgagaggccgaggcaggcagatcatttgaggtcaggagtttgagaccagcctgaccaacatggtgaaaccccatctctactaaaatacagacattagccgggcatggtggtgggtgcctgtaatctcagctactcagaaggctaaggcaggaaaatcacttgaacaggggagggggaggttgtagtgagtggagatcgtgtcacttcactccagcctgggcttcagagtgagactccctctcaaaaaataaaaataataataataaatagtcattttaattttttttttttttgcctgtattagacagagtgtgaactacggaatgataaaatgtagtcttaggcacagatcctgcagggaatagcttttgaaattctccaacatactaagttataattgggttttaatgcataaaatggctgagcaatttaaatgtttagaaaacagtctttcctagagtttatgaagtggtaagcctatttcttataatgattaactgtgagtcatcctttcaaatacaagcatccattagcatatgctcctcacaagaaatgctgcaaggcacttgccagtttaccaaactagtgtcttattatggcaaatttgtcgcagatttttatctgagaaatgaagatgggaagtaacgaaccatgaaccacattgagtttgctgtctacctgccttgccttactaggtgaagaacaatgttttaaaaacatataatcactatctgtctgcatgtagtcttgcttggagacagagaattcactacatcaggaggtctgtagtctacagaatgtgtcacagtgacagaggcctgtccttgaagacttgatccatctgcttgttttttaccagagcttccctttgccatcagtttctagtcccacaccataaacatcatttcagtaatggtgagccctcttcccctcttcatgtcaaagtatgcaggaaatgcaggcatcattacctctacatgtcaattgtgaaagcttctgggcccagagacaagtccttcttccacaaccttcctgccccttaaggaaatgtttgaatagagaaatcattggcctaagcctcagaagaacagtgcttggaactgagctccatcacacattggttatacagctgaatattgcttaaatgtcctaatgaaaacaatacaatgtggatacagtaataggcaaattgggttgttgtaagtgtccgctgggataaagcaggcaaagataaggaggtttgcaaatgcaatatatcatcgtaaaagaaatcagccctttgaatttttttttagcaacaattcagaggctgagagaaggaaggcacagccagaaaatctgaggtagtgagttctaagttatatttaaattaatataacttaaatggaagacgaatgggaaagagaaataagttaataaatgcacaagacaaataagtttgattcctatggatgctagaagtgtatgtagtggtaagctgggcagccttgggctatgaaccagttgagattgcttatgctctacaaagcattctagtctgagaagagctggaggtcacatgattccttagcattagcatcctaacaaggtccttctggaaatgtaatgacagggaatcttcagcccagcactactgaaagatacatagttgcaggcagatgggcttcccattctgatttatccagatttaaactaaatctattagttcttcagtggcaaaaacctcccaaccaatgaagtccacgtattgtctgagttgacgggtcaatcaatgttgactttgtagcatcaagttgggagtacaaactcccactcaagttgcttgtattttctttgctaacaaaactagaggagcagcaaagtttatctaaaattctcatcttcaaagatgtaacggacaggcaggtagagttactttgaatttaaactaagttctaatgataaagtgctcaagtcactatgaaccaagcaaattgtttaaggacaaaaaaaaaaaaaaacacacacacacacccatagggacatacggacggcatgcaatcagtatgtcaatgcacattagataaagttacaatctaatataatatatttatctgaaccggtaaataaatggtatgatgaaatgtagtatcaggatcaaacgtacagtgtagaataatgagagctggtacacctactgaccttgagctttgagtgttagctgcatgatctgggctcaccagccattatcagcacagtttacaacccaactcagaagtcaagataggtgataagcagaggttactgacaataatgctattgttagaataccattattagattattacaatattattgaatataatgagaaattgttcttataaatatttctcaatttataaaacatttcctggtttaatttcatccctatactaataagccttggaggtgaatatcattgactctatttttcagataaggaaagtgaggggtaaggaattgaatctttctgagtccaaaagtctttgtcttaattttaggccatactacacaaattccattttcagatttgatcccagagtctttagctagaatgacgttagtattactctggactttggttcagaaaggaatctgaaattgctccttcacagttttacacactttggttatagaagggcttggtaagctctgcaataatcagttgatcacgtgaagtgaccttcagtatctacaattttcatgagggccctttaagctcatctctctttcccaactatatgagcaggggggtgatccctgctgtccatcacagacattgatacagaagcattgattgcttcaagaccaaaagaaaaatacagttcagatctacagattatgatcatagaaaaagcctgaaaaaattatttatacttaatgttaacagtggctttctgtatgtaatggaataatgagtgattttcattttcttctccaggttttttattcttaaaatattttacagtagatatgcattatattgttactaaaagaattagtttaaaaataacagtgatatactgatctgattttagtgaaaaagaagtctgtaaaatgttctcccttattgtattaagacactcaccttattctgtcctggtttttaaaatatattcaaatgtgatccatagttacactgtatttattcattgctctggtttgtcttctgatttctagcatctgacaataactgcagggaatgctgagataaatcctagctctatccctcactaactacatgacctggagtaattcagcctccccatttcatcatctataaaacaggaataattatgacctatgtcttcgtatgcaagtgaagttctttaaaattctctagctatccataatttttccctcttcataaatataaaacttatttcatgtaattcatttgacctcttaaattgacagtttgtatacgtattctatctcacgaattggtcaaatgtacaaatgaaagaaagggtatgcaatggtgcatacagtatcaagtaggatgtatggataaaatgaagggcaaataaaagctagtcactcacagtcacgtaggacctaatagaaccatgtaaataaccacaatacaagttaaatgggaagggaaattggggaagagtaagcttatttccaaatagaatctgaatcaagaaagacttaatgtataaggtagcatttgaattagggttttgaaagaggagcagaatttcataggctggaaactggtactcacatacaagaaaaattgtgaacttctgaattttctttgcatctctacctctcagtagtgtgcctacacaaatcatttcctaccatttcattgttcattattctctgcttaaaactaactctttcctggttgaaactatcaaggattgaacatttctctcaagctcaagaaagaaccagagcttgcacctgggagcaatttcccagagagaggagagcctgggatcttcgtagtcctcctagctattatggaaatggattcctgtgacacttaacagtaatttattgagcaaaatttgtatatatattctgcaaatttaaggattgaaaacaagctgtgtttttgtttggttggtttgggtttaaaaccctgaaagtaccttaatgcatggatttatttacctgttcgtttggttggttagttgggttttttgcaaagcgcttccttcacagagatggaaggagaccaggtttcatatgttaccacatctgcctggtggagatgccaacagctcctgtatcagagggctcttattaaaagcacataacaatagtaagagttttataaatatttaaaacaaggaagatcaaaatcatgtgaccagaatacacaccttcgccatgatctttaccttaatattttagagattatttgttgtctctacaagtactggcatttgtattttctacaagtagaaaactcgggcacagggaataaacccccaaagaacaacttgtcataaaatgttaggtttttaatttttcatgcctagttaacagatgaaaccaaaggctatatttcagtgaccaataactttgttgctgtgttctcattgatgctagaacccatatgtcctctgctagtggttcatcttttacccgttctcttttattaacttatcatcctagtctgtgtggtatttataataattgatcatggtgcacatttcagtgagcatttgtcaacccactcatgtctcaatgccccatggttagggatatcttattatgtgcagcattacacagagaagggtctcaagtccttattaaagatatgaaaaacactaggatacaaggacatatgtatgtctttaagtgacatttcttttattcctgtattttagaagattaagctatctcagtaaatatgaatcgtattgatagaatggctgtgaaaatcaatttacagccaacagcccctttgttttgctaacctgtgaagtttattctttctccagtactataactgttacctgaagagcaccagagctcctgacacacctggagtgtgtgtatgaacatacacacatttacagcaagaaatctttgaggacaagaggggtgaggcaattgttaacccccatcaccatcaacacgaaagggccattcactggttaccgaccagatactgtgcaagattctttcagaggtgtctccatttagttccttacaactaccctataagttagatactattattctcattttactgatggaaaaaatgaggcataacaaagttagcatgtttaagaaacctgtagatagtaagggcaaaagctaggacttcaacccagacctgcctcactccaaatgccacagttttttttttttttttcttttttgagatggagtctcactctgttgcccaggctggaatgcagtggcgccatcttggctcactccaacctccgcctcctgggttcaagtgattctcctgcctcagcccctaggtagctgggattatgggcgcctgccaccatgcccacctaatttttgtatcttcagtagagatggggtttcaccatgttggccaggctggtctcaaactcctgacctcgaatgatccaccctcctcggcctcccaaagtgctgggattacaggtgtgagccaccgcgcccggcctgaaatgccacgttcttaaccaccctacctcactgccttctcacctcaggagggggattcatggaacaaagcagtggctaaaataccagccaacttgacaatgcacaaactggtatcagcaaaggcctaagcaatatcatgtttctaaatggaagcatcaaggcgttgacagcacagacacacacacatgcacacacacaggaattttattaacatcctctccctgctgaaacttttaatgcgggcctacaatgcattcattgcaaggtgccattagggccaggctcacttcaagtgttaccaattcatgggcagattagagggcacattaataacgtagttaatatgaagtgtttagagcctccacatcggtgacaaatacgactcagccaaatttcctgaccactgaggccacggaggaacaatttggtagatttcatcaacagttctaattatgttcctgtcaagtcgagaacgaagtaatccataactggggggtgctcagaaacagtggcacagaagaataatttatgcccaaggcacagggtcctttctgtagttagtgtgcacaacgcttgactaacaagtgggttcaaaaaggaatttattagggaaaacacagccctctcgctttgagaggcttgtcaggtgtaagcttatgaggagttatgaggtaatgacttctaggaagtcttgtttatacaagcatctggagttcagggctctcggaagcctcagaaactgcaggttgtaagatgcaggatcttggctccaagcctcactcagacttttttcacccgctagatttgagccatgtctcttgagaggatttgtgggcagacttttaagtgtgacaggaggggaggctggatagcgggagccaatgaggagtcaacttagggaatagatttttaaaaaataactgttcgatcctcagatagcattatcatcggagatacagggataatgttagaaggaaaaaaaaagggatgcttttatgaggctataaataatgtgctaatggaatgtgcaaaggaattgttaagaacagtaaactgaaatgtcataatacccccaagcctgggcgtgctctcacctcctacaactgaactatgagacagacaattggaaaagagcagggggaggagaggaaggaaaggggcaaggtggggaggttgggggaggaaacgcatcacacaatgtttgagtgattttccactgtgatctatattgggatgcagctcctgttctctccaacagggtaattttatacatggcattcttattaaatatttcaaaggggggaggggaaggaggaggaggagttacgtgtctggtgcatattttttaagagttaaagctggtgttgttagcagaggcttggttattagcaccgatcaactgttaattaaaataaaatgaagcttcttaaacttcatcaccttattgcaaattatgcaaaaaccacaactaattgcattattagcaaaaattacatttaaaaatagcttcacacaaagaactaaaattatctcatctaaactcgcttttaccaaatgaagcctgaggagacagagctctgaggaaaacaagggaaaacaaaggtttttcagcctctcattcaacggggggaggaaagaggaggagaaaaagagagagagagaaagaggcagggggagagggagagaaagagggagaggaagggaggaaggaaagaagagaaagagattactaaatactaatagaaatcgtgaataatgcgacattacttaaggtaaactattaatattagataaaaaatttagataattcctactaaatacaacatgatatgcatttggatatagccaattcctgatcctttacaaaaaattttccaggcaatgaagtgagaaaaaccaggattcctgattactaagaccttctttggttttcaaatgtggggcctggtcagaaatggggtgaaaataaagcccaagaatgaggagaaagatgtttgcaagtcactgggcacttacatgtaaatatatatacattttttaaaaatagaagactattatttattgttcttttttccccaaagatgctgctacacttctcctgggtagatagccaagagctgcctgtctgcaaatgattcttcatgctttattttgctacacagagacttcagggtgcccacaggtccctctgggctctctcatgttatacaactggcaatatgctaatgccaaacaaggcagtgcattttgtcttatgagcaagcgctacacaatagctcatttacaatgaatcattgtacatttaatatcattttgattaattttttccctcactgtacccacttacttttaaggccaccttcatctttactcagcaacagcaggtattttagcaaaaagtaaaacattagatggacaaaaggacaattatcatatacatttccaggaattccttgctcaacattgactgacgctgctaagctgaactgaaagttccttttgactgttagtcttggccaggtttctccggtaggtggagaacactagcactattctcctaatccaggagagctagagacaagtcacctgctgaaatgtcatcctgcttcagggtcatgttgtataaccctttacataaacagcaactgcctgaggagcatcttacattcaacaactctgaacgaaaccctgcaagctcattcagcaaaatggccacatttgctaacagagtaaactggcccatctggtggtgcacccaactcaccaaagtctgggaggagacaagcctacctgatttccctctactctttttaaaattcctctactggctgggtgcagtggctcatgccggtaatactaacactttgggaggccaaggcaggtggatcacctggggtcaagagttcgagaccagcctggccaacatggtgaaaccccatctctactaaaaatacaaaaataaacacaaaagttagccagatgtagtgatgtgtgcctgtaatcccagctactcaggaggctgaggcaggagaatccctggatcccagaggcagaggttgcagtgagccgagattgcgccaccacactccagcctgggcgacagagtgggactcagtcaaaaaaaaaaaaaattcctctactgccatcatgctttgtaaattaattttatttttttttctctgtaggacacccaaaattctccaagatttaggagaattacagcagtactgaacaattccaaggcattgactgcactaacacttgcagttccagcagagtcagcgtgtcaggatccttcacagtgtaagtgctcaagaaattacctatggattgaccgttctgcaaggaaaattgcatattttctaaaaaaaaacacccaatgttacacttcaaatgttataaaagaattattcaaccacatagtgttttgaaaatgtgtaatttagaaataacgtgtaaggtgaggaaatcaatttagtcataagaattcagtcagatccacagcatttgatatccagttccaaggctgtatgtattgttactagcattagctacaatttcctgggctatctgtactaataattacaagatatctgcttgtagatttgtaggctttatggtatgttgatgctttagtgcttctaggtagtttggtccttcttcaagatccagattcatcgtttctgtgacaaatttgacacacaaaattagccaattagtaccatcatttgttgttcttttcctactcctctttaaaaagagcagccaatagataccgcttaaggctaaatttaggggagagaaagatcatctgtctaaatcaaggtggttaatccaattaccacatttctctgagtatagctgccctcaggctaccatatatcactgttcatctgaaaagtgttcttcagagattttgctggggaaaatctgccagcattgtgctacccatgcatagctccatagaacaagcaagtggcagtaaaatgctacggatagcacatatgttgaggctggctcgaggagcaccccaactgtcacttatggagttattccctatgcaatggcatttagagtgcattgaccatcaaagctgaggtgagaccatgagtctctctagttcttcatctgcacagttatcacggggacaccatggttcaaacaacagcgctgcagtgagggtgaaatgaaacattgtacagttcacacattttgcaagctataaagttgaaagagaaagagctagagtcaaaggtgacttagggacgggtgctgtggctcactcctgtaatcccagcactctggaaggctgaggcaggaggattccttgagcctaggagtttgaaaccagcctagacaacatagtgaaactccatctctgcaaaaaataaaaacattagccaaatacagtgtcttgcacctgtagtcccagctactgagcaggttgaggcgggaagatcacttgagcccaggagtttgaggctgcagtgagctgtgatcgcatcattgcactccagcctgggcaacagaatgagaccctgtctctaataaaataaaataaatacaataaaataaaaaatcaacataactctacccgtaatataaaggacaaataaagaaaagtcatttatttttgatttttttaaaagatgacttaggtatttttcaatggagatggatattggagtaaaacagtgagtcattaacaaaatcacagtcaggaggtgataacctggaaaagaagataaaaaatgtttgaaaaatgattgtctttgaccagcatcttgaagtgctgttgaaaattaaaagacaggtcaagactggaatgtacaattgggtatcgcatgcatagatatgagctttgaggccctactcatggaagaatgacaacaacagatgctagcaatttgaaaacaaaatgttgtctaagaaacagggagaaagtcaggcatagataggctcatgagacctaaagaagaagaaagtgtcgataaggaaaaggccattaaatacagcagaaagcactgagacagtcagcggttttggtgattggagggtcattggagccttagagacagcaattgaagtacagtagggaggcagactccagattacaagcggttaaaaaatgttctatgataatcagggggagatcaggcagatgaaacattttcatgataaaattgataatgaaggaatgacagtagcaagggaggcagctgtggagttttttgttgctgtttgctttgtttttggaataagagaactttggcatgtaaatggaggaaccaactgataatcagagttgaatctttggtaacaccgtgttgaaagaaaaacttcagctgattaaatttaaaggagtttaactgagcaatgagtgattcacaaatcgggcagcccccagaatcatagcagattcagagacactccagcgcagccacttggtggaagaagattatatacacaaaaaggggagtgacgtacggaaatcggaagtgaggtacagaaacatctggactggttacactcagcatttgccttatttgaacacagtttgaacactctacagtgtatgagtggttgacactgacacggctgctggtattggccagcctgttacaggcgcacactcccaagttaggttctcagtctcatctacttataaagttaggttgcagttcgtcctcaaggactcaaatatagaaatacggagtccttctcaggccatatttagttcactttaacaaccggaaaggttggcatcagttttggaagggaggtacattccaccagaggtgagagaggagagaagatgcctaaacctccatttaacttaacaatggaaaagaactgccaatgaagtgggtgacgacttccagtctcttaaaagaattacaggctaccaggaacgggagtcaggtcaaacagccaaacaaggctcaacaaatacacagccgtaatatttatatcacaacatttaatgagggaacttagctaaagcgattttttaatgtcttgagaacaaaaccgcttgatttattgaagcttctactttttattccattgttctgaaatcatgtggccctagttcgatagagtcccattgtatcaaaaagcagagtttaagaaaaagtacctgcttaattatgtgtttacctctcaatcaagtgaaatattttaggagctctaggttctgcttgtgcagagtgagggacacagccgatgctgcgatttcaaaaaaaaaaaaaaaaaagaaagaaatccagaatgatacattggaaacctatatttttatcattagatcaattttcaaacctaacaaaaataattaaggaaggttttggagaatgtaaagactcaattctgacatattcacagcacaattttagaaacaaaacaaaacaaaaacttccttctcctctagtttcctttctgttattatacccacaagtttcaagaatctgtctgttcatctccaaaaagaaaacttcaggacaggaagaataagagaaaacaagaaaattaggttgctgtctcaccagtgagttgaaacccatcagcagtaagccattgaatttaactgcacatcttttattattttattttactttttactgtttttctttctacaatcacgggcctaccaacactgtaatctcccagtgggagccaggcacagcacaataggatgaccggggaagcgccaggaaaacaggtgatctctctcttcttccctctctgtgtgtacaaggagcttggcataaatgagttttacaacagccaccagccattgcttatttttttctgagcaatcatcaatatcagcatcaagtggtgcagtggctccacaatgagtcgtggcggcagagtgagcccagcatgcaaacattttggctaatttaaaatccttgtgcagccgaatcaaatatgacaagacgatggcaaaaagagaggctattatcccaaatgagagttggtagatggctgaaattggtttgagtggcagagacaaaagaggggcaaagcagagaaataactgagaataatcccagataaaacaggctgctatacatacatgtgtacaaacaaaaacacaccacagacacacacactcagagcagaaacataattgcttccaagctttagtactggacggatcaaacatgcaaccagcttataataaaaataaataataaaattacacatgataagcatttgtccagtcacaggtaaagatatattctattttttttttaaatacaacttttaggccgggcaaggtggctcacgtctgtaatcctaacactttgggaggccgaggcgggcagatcacgaggtcaggagatcgagaccatcctagctaacacagtgaaaccgtgtctctactaaaaatacaaaaaaaattagccaggcgtggtggtgagtgcctgtagtcccagctactcgggaggctgaggcaggagaatggcgtgaacctgggaggtggagcttgccataagccaagatcgtgccaccgcactccagcctgggcaacacagcaagactccgtatcaaaaaaaaaatacaactttttccatagaaatctccaatttttagaatattaaaactgccatttcatatttaaataaatgtgctgatgtctaatagctgtgactatggggaagacgggagtcactgatttaggactggcaaattttggcttaaagatagcccagtgggttggtgctgagagtccaaagatcccctggtcatcaagagaatctgagagagtgggctggagatgaggaattcctcatgaaaggcaacagagagctaaaaagcaggctgatggggtcctgagccacgaaccttgaccacagcttacagtgccatggcttccaccctgaggaaagatgacctgtggggagctgtcttttgtaagattaacaatttaaaagggttgaagagaattttttcaaatagttgtggctgcagactttttacaaagtaggttacaaggtcagccagctttcagaagctttacattgtgaggtgtttttgtcattgttgttgttccaatagagagagtagacttagggtggcatgcagctacaagcccaaaatatggatataaatgaaagtctctttaccacagcctaggtttgggagatgagcttttctttagtctgttccccagaattatgccttatatataactgcacatgagaaggcatgaaatggagactaaagccaccatgacagttgactgttgcattccatctgcactcagctggtgaaacacctttctcttaccttagatctcctcctagccaagcacctgaagccaggaattgcgagggaacagagagatcattatgtgtttactcctatcatacattctcaatatcaagtaaaaattggttctcacgttgataatgatgaaacaagctctagtgtggcaacagaaactgggtttagttggtttttcagtctataaaagtgttgtctttagtacatgaagatcacaccactgacagttggcatttacaaatttgtcatttttccctggttttgataatgcctttgaaacagtgacactcccttttctgatactgtagtgactagggggacacatgggtaagacattcaatgaattttagaggaatacagtgatttttttttgaagacgaaaaacaactggcctagatagggatcaaattcctgactttagcctcaactcaccaggctataaccaagtaaatttaccttaaataacaattgtttaaggtgaaaataattgtcaagtagttacacaggcatacctcagagaaaatgtgggtttggctccagaccactgcaataaagtgaatatcacagtcaagtgagttacaggaattttttggttttccagtgcatttaaaagttacatttataccataatatagtgtgcaatagcattatgtctaaaaaacagttttaaaataccttattactaaggaatgctaatggtcatctgagccttcagtgagtcgtaatctttttgctggtggagtgtcttgcctcaatgttgatggctgctgattgattagagtggtggttgctgaaggctggggtagctgtagcagttttttaaaaaaggacaacaatgaaatttaccacagtgatggagtcttcctttcatgaaagattatcctgcacgcagggtaaaactttgaaagaagttttactacccaccataaaacttctttcaaaattgtagtcaatcctctcaaatcctgacactactttatcaactaagtttatgtaatattgtaaatcctttgttgtcatttcaacaatcttcacagcaccttcgctaggagtagatgtcaccttaagaaactactcatctgtaaaaggcttttccttttccattcaaattttatcatgagatttcagccattcagttgcatcttcaggctccacttctaattctagttctcttgctatttccaccacatctgcacttccattctctactgaagtcttgaatccctcaaagtcattaatgagggttggaatcaagttcttccaaactcctgttaatgtggatattttgaccaccttttatgaatcacaaatgttctgaattgcctctagaatgatgaatccttccagaaggttttcaatgtactttacccaaatccttcataagaatcactatgacagctatagcattataaaaggcatttattaaataataagacttgaaagtcaaaattatttcttgatttatgagctgcagaattgatgttgtgtatatgaatgaaaccaacattcatcaacatgtccatctccatcagagctcttgggtaaccacagcttcatgtatttttcattcatctattgaacagatgaatgaaaccttcatctccttgtccatctatcagagctcctgggtaatcaggtgcattgtcaatgagcagtaatgttttaaaatgaatctttatttctgagcaggaggtctcaacagtgggcttaaaatatttagtaaaccattctgtaaacagtcaaccaggctttgttgttccattgatagagcacaggcagagaaggatttagcatcattcttaggagccctagcattttcaaaatggtaaacgagcaatgacttcaacttaaagtcaacagctgcagtagactctaacaagagagtcagcttgttctttgtagctttgatgccaggcattgatttctcctttctattaatagctaggaaaatcctagatggcaccttcttccaatagaaggctgtttcatctacactgaaaatctcttgtttgctgtagccaccttcatcaacgatcctagctagatcttctggataacttgctgcagctttgaaatgagcacctgctgcttcaccttccacttttatgttacagtgatggcttatttccttaaacctcatgaaccaacctgtgctagcttccatcttttcttctgcagcttcctcacctctctcagccttcacagaattgaagagagttaagaccttgcttttgattaggctttggcttaagggaatgttgtggctggtttgatcttctaccactaaatctttctccatatcactaatgaggctgttttgttttcttatcattggtgtgtccactggagtagcacttttaatattcttcaagaactttcctttacattcacaacttggctaactggtgcaagagacctagcttttggcctgtctcagctttcgacatgccttcctctgtaagctaaatcatttccagcttttgatttcaagtgagaagtgtgtaactctttccttcacttgaacacttagaggtcattgtaaggttactaattggcctgattttgataggttgtgtctgggggaataaagaggcccaagaagaggaagagagacgtggaaacagtgcattggtggagcactcagaatacatataacatttactgattaagttcttggtcttatatgggtatggtttgtggtccccaaaataagcacaataataacatcaaagatcactgatcatagatcaccatacaagatataataataatgggaaagtttgaaatacagcagaatactgcaaaaattaccacaatgtgacacaaagacctgaggtgaacacaggctgttggaaaaatggcagtaggtttgctggacaaagggctgccacaaactttcaatttgtagaaacatgcaagatctgtgaagctcagtaaatcaaaatgcaatgaacaaggtatacctgtagtcatcatcaactcactccaaattggtggcccccttgttaaaggttattgtggatctttaaattaaaatagaattttttttttctaatttctggggagggagtgagagagaagcatcagcacagaggagagagagagaaacacgcacactcagggtagactcccagcactggcctctccaccccgcaggccttttccgttttgagaagctcttagagcacagaagcagacctgttttcagggcaaacatctaacttttaacaccaggggctggcaatctggtcagcatcagtttgtacactatccttgtcctgagggattttacaggaattcaatcaggaagcaaactgtggaagtacatgaacactgggcaaaaacagctgccaacttcatttaggatggaactttaacataaaggaacaaggtctaggagcattttgcagcccactttggagagctgttaagaataatgcctcctcaggacagtggcaggccaggtgaaaacctgaaagaataagacaggtagcttatggcaggtttactttatcacgccagcacctcttaacctccccttcagcctgcagggccagatgtagcctgtagtttggaataaaagacaaaaaaggcaagtgtctggttctaacataaaacctttgggaaatgcacatgttggttcatctgggttcagcaaatagagcaatctttacttcctcattaatttttacattaaaagaaagaaaaaacaagaagaaaatatctgggtttagaatggtacagatgatttacaaaaaaaaagagggacattactttccataatcaggtccagttttcatatctagttttcatttttcaaggctaaattaagtaaccctctaatataaaataagctttggccattaaagagaataaaattaattgatctagaagcttgttgtcagattggtaaaagtaaggccagaagataagcctcttcattattcatagtagcaagaaagactaaaacaaaacatccaacaaccaaagatcatttttgatgcaggaccatcttactcttaggaaatctttgctattaaacctattcgctatgcctagttctatatgaagttcttaacttccttttcattttttgtctcagagttgaatttatatatttatactgaggcttaagagaaccctggttcgtagttcagaaagacattgctttctagggaggtccgatgcaggtccgtagggcatttcatccatcctgtgcttgcgtggcactcactaccaagggagcctattaggaaagaagggcacactgaagtatgaactgaaagctgtcagaaagggaacacccagatgctggttgcagcagctatggctgagattccatttgtcttcagagcatcagcagacaatatatgtattctgtcacaaactccacttctctctccaatccatagtgtccttaatgtaagaggcagatgtgctttctgcccggagatgtggcagcaaccagactgtcacccaagactctaattaagtggtatgtgacatgcttctaaggcaacccagccaaagatcaacctgcccattttactgagtaaagacatgcatctttatctacccattggcaggaaagcaatactactaatccaagaagcaaaggtgctatgactttgatagtgcatttataccacaaatctttgaagaagtaaaagagtgttgaaaactgctttattgcctcatgtgccagctgtgatctgacatacacaaatgtagggatattattcttttttgagctggtagaatttcataaaaaccagtaagctggaatccacactcagacctatgagatatatatcatcaaaatattagtgactgtgaacaaatgctggtctggattaaatctttctttttgccttaaagagactaaaactacctttctaccttgtccaaattcatgatgatcagggaattggacagaaaacctagttgctgcacagcccaagcactcatgaatgggaaataaatgagagatagtcttttttttttcttaaatttccatgcatctttacaatactgtcccaagaaagggggctaagaatcaaattttgtttttttttaatattttatatgagatttgtgaggctatttttgctactacaacatggcaagcagggagtttcaagattgtgattttattaaggaatagaagacaaccttttttccacagggctctacaaaatattccatcagcagaagtgttaggcaggtcggaaagactaagtttttcaaggtattaaattaaaagatgttgaattacgttaaatgccccacattgaattgacatttctccttttttaatgcaagctaagattgatgaaaaataccacttatctacattaagggtcaaaatctctcacaaaaagagcttctggttcaacacgtcagagcagagtcagtcttccataatccagggaccaagacgcggatcacattctgatgatccaattaatggtgggatactttgcaatcatccggcaagcaaggcccctaacagattgtggggctgtaacatcaatttcttaagtgcatttaaaggattacaaatgttagtcctggcttgagattgaaacacctattgaggtactctgaaccacattactgtaattgggtacctgaattaatgccatttcttctgatgggtgagttgaatacattggaattaagagttctttttgctgtatttcactttctcattctttcttcctttttttttttttgtttccttggaacataaatctgaattgaaataactcttttttaatccagatagctttaattacagccctcaggaatccaagtattgtcctcattttacctcatgcactgtttgggtgcactcttctttgagcttgttatcttaatatgcagcacttagacaatgaaaatacaattcttttctttaaaaaactaagggaataaggaaagggggaaaaggagaggaagaaggctctgcttctctttccttccagccatatgaacctcattatgaacacggaggatagcacttgaaattcattacaggcctggagagttaagatccagatcctccctaaacctttcactctttctgaggttggttaaagtaaaagttctgattaaggaagaactaaataggtgggtattgtcagtatattttaaacttcaaaataaggattttgaccttctttcccaacttaatctccattaagtccctcagctaaggggaaatcacatagcatcactgcgtcaaacctccccgaagcttgctatggtaaattgaatgaaatctgcactccccacttgagtctaaaaggtcctacgtgctcttcctgctcagctctgatgtcatattcgattgctctccaacctgtgcaccaggctgtgtcctcatgcagcttcttcctgtcatccaagtgcaccacgctcctcctccattaaggccctctgccttaggcattctactctgagacttcaccctcactcctttcagatttctactcaaatatgaatttatagagttccctgactctgctataaaataatactgatgcgcccccatccttctcaagtcgtgcactctttcctcccctacctcatgtttcttcatagcattcgtgcatgtgtgtgtgtgtgtgtgtggtgtgcacacatgcatgcaaattagtaatatatgcaccacacacacacactcaaaaacaatgactgtacaagtaggaactttgtttcattcactaccagaacacaagtaaccagaatagtacctggcacaattcaaatatttatttagttggattgaactgagtttttgcatggctaattctgcctcattattctggtctcagatccaatattttctcacagaggaccccagatgactcttatttaaagtagcactttccctatcctctcccttattaccttgttttattgtcttactattttttagtaagacaaccaacatctgaaataccaatgtacgtacatatgtttgtatgtttgcatatgtttaatgtctatttctttatcttattacttaaagttaatgagggttggaaaatgtttttctgtcttgttcaatttggtgtttttagtgttaagaacagcacttggcatgtagaaggagtaccataaatatttgttaaatgtgtatgcaattaattgaaccagagggagtcaaacgtgcaagagcctttatcaaaatagggttatagatgacacaaactctcttcacctggtataaagataacattgatagggtataatttattccacctactgtagaaaaacaaagctggtcatggtagttatcatcggctttggtaaggagacacagaagagctctgaagaaaagtctggcttagagaaaagctacttctggacaaaattggaaaacaggtattgcctgtcaagctgtgcccccatctctcctgttctgtgccctttcctggcttgtaagctatactgttttatcccctctagactctgaagcatccagtggccttcatgtcagtacctgactcagttttcccctcccctgaaaacattcctactctggaactttctaactcatcctatccttgtctttcttccaaaacatccagattcaggcatcatattctcccagtcgctactcttaggcttaagctaacctggcaaacctctggacttaaaaagcatcagctggcaataataatgaacaggaccccactttcctggaagagtgatacaccctccactcaggatgtctccactccactcctctttgagaggaagggaaagaaagctgcgtttctattgcaccaagaaggaaatcgtctacagaaggctcccagtgtctcttgtctttctttcctttgtcacagtaaccacttaaccgtattcattcctgatcgtaaaaataattttctaaaaacacagtagcaaatttaaatcatgtaaaaagaacaaaatttaacctataaatccctaaataacaacttcatagtttgtttctttttggtctcttctctttggacatctttacatggtcaatatcgtacactatatttagttttcccccacttattatattgtgaaaatatttccacgtctttacgtattcttgatcaccattttggacaggagagcgtatttcactatagggatttattgccatttagttaacaatgccctataagaaattactaggttatttttacttataaacaaggaaacaataaacatatgtctttgtctagaggagttggcaaacttttctgtagaggtccggatagtcagtattttaggctttatgagccatatggtctctgtttcaactactcatttctgctgtagttagatacaatgagtagataaatggctgtgactacgttccgataaaattttattcacaaaaacaggcaccggacagaatttggcctgagggcagcagtttgccaacccaacccctggcctagatctctgattgctttctcaagatgcataaaagtgtaatcactaagccaaaggggtgaacatttgtaacagatactgaaatatctattattcatcttaaatattgttgcatgcttgatttttcacaataacaaagtcactaatttagttaacttagaggaatcctgacccaattaacattcctcaaaaaggaggaaaactgaggcccagataaagctgaacctgaatcttcggttttatttgacattccccttatgtagttctctttaaagatagttttttgtatatatatttatatatataaaactaattcagatgcagaaagcaagtttccaggagtactgcaacagtgcagtcactaaactaagaaaagacaatttcttgaattctcagggctttgataactcaacattccttccaggtaaataattcaatggcagtcaccagcagggtgactactgcttttttagtgtaaaatgagtaagataagaggcttgttaatcatgtattatgattactgcttaggccacaaaggagagttgacagtaccagttacagtacatcaaggtctgccgtgcacaatttgtgctactagggctctatattattaaagtttgaagatgtgtgagggtataaatgacccctatctaaagttttcaagtaatgtttagtatttacactataaatctgctctaacatggcattaagttgcaattttagttttacttaataaactatataggggcagacaacctatttgctatctttattctcaacagacaaagaatttaaatatgttctcaagagagttcaaaaggtaccatgatttaactggagtagaaaggaaagggatacattttaattcccaaaatgattttcctcgggggagtatgaacgctttttgcattctgtcatggtttctttttaactacaccaacacatcctttctcggcaaccaaccagagatgatgagagccaggatgaatcccatgagtcattttagtccaggctcctgtgtcagcagagcagttctcattattcttaagcatattgtctctctctaaactgggcatgtccaggtctgtgattctactatgatatgaatggatattaaaccctgggtgaacctgctcttcattcatggcctattatcaaagcatcatgactgctgagctgaggggtccatgcctaaatacagacattgggcatctggttggcaagaaacacagtggcggtggctatgccctctaactctctagtgtacaataatatgttcagggagcagaagagggacactccattcttgtctcctgtggctaatgttttttaatcatgaacaaatgctgttccaagatgttggtataggacagcgtttctcgacctcaggattataaacatttagaggcagataattctttgttgtgggaggctgtcctgtgcattgtaggatgtttagcagcatccatggtttttgccacccacttagtgacaaccaaaaatgactccagatattggcaaatgtcccgtggggtaatggtgggaggtgaaatcatcctgactgagaaggacctagaatggcaactcaaaggcagaaagacatgtaaaagtacacactgcacttgcccatctcctctgtcaagtatgcttctggggtgggaatgaagaaagcaatgcagccctgggaagagacaccagaaagactgagccctacatggacatgtaaatttttctctacctgaggtttagaatgtctggcttgtgctcagcagtcatcacaaagctagatatgaatttcttggctttttttttttttgactcattaggtcgccctgctcaaaatgatttacacagagataattaaacttaagccctaagggctagttaactgtttagcagtgtatacatttcatataaccatttccatacatctagttttaaattcattaacaaaaattaatagctacccagtgctctacattgcgcagcatgttgctatggtatgcttgctaaattacccctttctatcactcctccagcgatctcatagacagttaaactttgctatgctggaaatgttgcctaccaatttgcagcaaagctcatatttactatatttagtgtgaataattgactgcacttcggaaaatatttgtctctgtttggtgtgcctctggaacattctatcagctttaaagaacagtacatgcacttttttcactctttgaagaatcaccgagaaacatttaataggtaatactagcgctggatatgcattagaaatatatgttttactaatattgtccttcatctgaaagtcccttaactgcacttaaatatcttgtattttttcctcctggcgtattttatgaggacgaaatgcctttctgatatgaactacctatgacccattaaataattatcttcttatttctgaataccaatataaaaagaaaaatgagacagtaaatctcttttctataaacttattgccacaattatacatattttagaatttttggtaattaaaatatattttccattaaaaaataatctctaatcattcttcaccaatatttacattgttcacttcaggtctgaaaaggagtcagggtgaactaattcattgtttacactcagaatcctaggtggcccaaacccataaaggtagtacaatgcactgtatctttcgttcttagtacttatcttaatcttaataactagccagacaactgactccagagtctggggcttatcaactggaattcgtcacatgaacccaacagaagacaagaaatacattatataacaatgctacacaagtcattatctctcgacatttaaaggtatgcattcaaaaactatgtaaggcttttatatatttatttatttatcttttgctgaactcagattccactagtttctattaaatttgatagcaaacgaacagaaatgcccttgttaggtattatctgcaaacagtttactaccaagagatcaaaaggattcgtcctacttcatttcagcattggctactgggaacaatctgcttgaaaaactttccttgatacagattatataggaaacagattaataagaaaataaaaagacccacgctcctcaaatattgaaaaatgtcaactactttagtagaaatttcagtatcttcccaatagcactttttctggattcctttgaagtagcttatacaaacaacagtaatattgagccatctatactacagttttcccagaccatgtcttgggttaaaaacaggacatgactctttcaactattcacatggaaggtatcttcttcagcagaaagaagtttatgaactctcttgttttagtgaatgatttattgtaaatatttctaattgcactttaaaattttcattctaaataaatggagactgaaaggtgtaatgcactttatatacttctgcaagataagatttatttcttttaccagttttacagaacatttattatgtctataatgagctaaatatttttactgagacttcaaatagaaatatatacacaatttaaaatgtagatagccaaaccattggcatcatccaaataaatattttctttaaaatcactccttttgaattatttcttcaaaagaaatgaatggtgaaaatatttgttaaatgacagctgaatttttgctttctaccaatgttgtcaatatgaagatactttctaataaatgccacctattatgtttcctcttctccagaagaaaacatcaattcattagttaaagaactcttagtataaacatattatttttggtgtgagtgacattaagtttattaacacttgcattgttaaaaagatgtagtcactatccaactctccacaggtagttttaaaccaaaaccttatgtagaagttgcaccatgtctggaaacaggctaaaaataagatatagtgaaatatataatgtatatgtttagcctagtaattatataatacactgtactcctatctcctttgttccaataatcaaaggtgcaattcttgatgacatttaaatatatgcaaaattaaaggtagcagagtttaatatgaaaagatatatatcatttcccctagaaattaaactcttcctgtgatctgtaataaataccgtgctgttttacaaaatggaaataagattgatgatattgatcataagtttcatatttttcattgaatctattgatgaatcatttaccaagaatgaacgggacaaaagatctatggaaatattgcttagttaagaaagagatgtgcttagataatatcacaatattttatcaaggctgtcatgtaaagtgctgataaatgttttatctttctggaagatacggccctctagaaatgtgtgtctaagcactaaaaaaggtatggtttacatgcatgtgtttagatgtgtagactccttatctagtatgtataacacttcctccaccaacatgatattttgtttttattgaatacattctatactacctatcagatatcgtgagtatgtttttctgaacccttagaatcctagcaggactggaagaaaggttaaagatctatgactaattagaaagataattttttgtaaagaaagaataactacacttctcagagtgcccactcattactaaaagctgtgtgctttgagtcagcagacctgaaaccaacaagatgcatgtgctgcttttcttgtttcggcatctaagttacttttgaaacacagtagtgtaggagagaactacttgttatggactaaatgtgtgtattcctccaaaattcacaagttgaaatcctccccactccccaccaggtaatggtattagcaggtgaggcctttgggtggtaattaggtcatgagagtggagccctcatggatgagattagtgcccttataaaaagaggccagagagcgctcttgccctctttccactgtatgaggatacagggagaagttgacagtctacaaactggatgaaggccctcgccagaacctgatcatgctgacaccctgatctcagactttcagcctccagaactgtaagaaattaaatttctgttgtttataagccacacagtctatggtgcttcattacagcaggccgaactaagacactactgttggctgctaatttgcagaaatgtgcatctctcattgacccggctaaggatccttttattttttcctgaacattatagaaataaacaagaccaatcaaacaaatattaggaaactggtatttaggaagagtagaaaaatcacccaagtggggccacactgatatcaactttacaaaataataagatacaaaaaaaaaatcaccaaatggattggttcaaagaagagaattcaaaactttgacaaagagcccttagaagggacagtaagaaagaaaagcaatatgagaaagaactacatgcaacctgttgcggctgagaagtttgtcagatagatgaataaagacttaaagcaaagaaaaaagagtttcccaaaagggttgtttaggcttggtttatttgagacttaagaaatacccctttaaaagtattattttgtccaagtccttcactcttgaaattcatcatcaccacctttaaagagattagtgataaaggttggcttcttcatagacagtactgatatatgctgggttcttggcactcagttacaatgatattagtaaagaagcactattagttaatcaagatggtgaacacaaccaaggtgagcaggacattgtataggaaattctttggagaagaaaccgtggcacacaaattagcaactgaagacataaacaagatcaaagagctctgatataattgcaaaaagtagctcacttatctgttaagcattttactatttagtacacattttggcaatttagcatatcttgcgttttatttccacaatgaaattgtaaactcctgaaaggcaagaaaaaaaatgtgttcatactatcttgtttaatgtaagataaaattgagcagaggtaagcaaacacttatatgttaagtttcactgaattttgaataaaatttgatttataggatgctcaataatcatagaagttttgagcaaaaacagttgaataatctgatttttcagattaaggtattgaagccctaaatgtcagagaatctaatccaaagtccagacatttaggtctagagataggactcatcctaccttatcttcttacttcttcccaccagggctctttccatgttaagatttaattgtttgactgtctctgtcttgaaacacatttgagtcactctgactatggcctcacttactttcctaggtcccgggaaacctaatatgcaccaggtactacctacttgttttacatattttctgtgagattttataaaagtgcttctagcctgcatctctcagcctattagaacccctgtcctttacaaacagttcccaaactttgtaatactctacatgttagtcaaggacacaaacacatatcaaaaatgtttatactctgacaggtatgcattatgctaaaggactgaatcaagttaatggtaaaaatagccaaacctcttttgtacactctgtagagcagtgcatataggccaattggctgactggtagcaaagaaaaatgacaagtccttctgattgaggcttcactttcagagtagatcctatgcctttatcaacctacttttcacatgctgccagttcgctctgaaatatccagcgtggattatgccacgtccaacttcaaaaaagttcaatggtacaaattctaacatgagaaatcataaagtccaaattcccttatgtaatacttgagatctttcctattttgtcttcaattcagtgttctatttagcaattatactcagtttctacacacaccttcctctagctcctccatttttctgttctttcacacacttccttgtctttattcatgcagccccagaaccctcaatggtcccacaacatacagactcactaagacccctgtctcccacactcagtgtatccacccatcacattttacctctcttccaaagaccgggtaaactcactggtcctccaagatgccattccttattccccaagtgccagtaaagcattcatttctgcaaacttcaacagcgagttgctttgagtgctgtttctagctttcatctgttttatttcatctttcctgcatttcaagcacttcataataatttcttggtgaaatgattcaactgattcaattgcttttttatcttttcattggacatacacttttcaccatttataggtttttaagtctgtttatacctttcagagcatgtgtgccttctgttgaaactgaaacactgtgctaatcctgacatagagcatgagcccagacacaatgccatcaattactttgtgaatcagctgggagttaggctcagctggctgcttctgcagctgccacaaaagctccctagatgtggcagggtgcggtggctcatgcctgtaatcctagcactttgggaggctgaagcgggtggatcatgaggtcaagagatggagaccatcctggccaacatgataaaaccctgtctctactaaaaatacaaaaattagctggctgtggtggcgtgtgcctgtagtcccagctactcaggaggctgaggcaggagaatcccttgaaccccagaagtggaagttgcagtgagtcgagatcgcaccactgcactccagcctggcgacagagcaagacaccatcaaaaaaaaaaaaaaaaaaaaaaaaagcaaagaaaaaaaagaaaaaactccctagatgtatttctaactagactgtaatattcttgaagatcagggagttgtcttatccatttttacacgccttgaagcatctaacgaataccaggtaggtagacaaatgtgtacacaagtctgaggatcaacaggaactgataaattttgtagaaaagccagttaattaactgcccagactaagagcactcaccctttccactttcacttcttagggcaggagaaatgatcatgtctatatggcgcctgaggtaactacttatggctatacaatagtcttggctgatggataccagagctgtgatataattgcaaaaaagtagctcactttctctgttaagcattgtttactacacattttgacaatttaacgtatcttgtgttttatttctacagtgaaattgtaaactcccggaaggcaagaaaaaaaaattttgacaaaattgagctgaggtaagcaagcacttacatgttaagtttcactgaattttgaataaaatattggtttataagatgctcataaagcatagaatttttgctcacgtttggttgctcaacttttggtcacactgagcaatcctctagaagtgctgggtcctctgaaaatgcccgtggaccaacagaaagctcctctctggagagtctgtccggttaggctttaagctctaggggtcaatgtcaggctccattttggaagaatttttcccatatatattttcaccctgaagaggaaagggtaatgctttttttcaaaatcatttaggacctatgggccgctgatatgacacttggattcaatattccgaaacaaaaacatgcaaaagttggcttgaacaataacagggcttaggtacaaagccatgttcctggcaacagcatctaagaaacaataaacagtagctctcgctttagtttaaagttgttgctgctgttactgtagctgacttgaatgcttctttggtgccagtcactgggataagagctttctgtgaattatctcatttaattgttagaaaaaaaatatctgtgggtatattatttctccattttacagataagaaaagttcaactctgacagattaaaaaacctgtacaaattcaaaaggtaacgtagaacctgaggccagctaaagtggaaaacaaaatgctttttgaatttaatgtaaagatgatactgtcaaggccgcaacgagactgccaaggtccaacaagtctgagtctgtggcacgtggaaggaagagtcctctctgtgacacatctgcgcttaatccacccaattaggtgtctccacctgccccctcccctgctccccagcaaggcaaaacacctgggaaccaacgagataaatgcagctgcaaagatcctgcggctgccgcatctgcacgacacgccttgtgacagttccccgcttgaaaatgcagttgtgcaaaggactgtgcagagtgtgttttccctcccactctttccattctcatttctttctctcatgtttatggactttatctcaatttgagtgaaggcagttgtgctgaataatgatgaggtgcttcctccagtgctgcacagtgatagcctgatagtttcagccagcttggaattcttcaaatgtcttctttttgttgttatcaaaagaggtgacctactacctggggcattgtgttgacacctatggataccaaagaggcaaagtattcgattatctcctttttttcccggtcttccctagaattgtaactcacttgctttgtttcttgtgaaaaaaaaaaacttcctatgaaaagaaaatatagaatagagttgatacacagtgtgttcaatataaagaaaaatggatgaatggatctcaaactgatgtaaaggaaaatttcctggaaagcatgctccttacatttcccatatagatattaccagttgcttaatcaatatgtctgtctctgcttctctcttcaacacacacacacacacacacacacacacacacacacacttggaacgaacagaagcgattcgagagtgaagaaattcatcttgacctgaaattgcttttggaacaagtccatctctgacatcaaaacaatttctgtcaaagtgtctgggttcaagcaacccacaaaatagcagcttatttaaaaaccaaatccactccttattgaaagtggtgatatttgaagcacacacaagtaaaactaatttaacctttggaaagttatctctggagagaagagtcaaaatccctttataagatttttaagcactgcaattattgacgaagagtatattacttcagttttctctgatcaggaagaggaaaaaagagaaaaccccacaagagacatcagcagctgtcaggctattttccaactgcaaagagatagtttacagtgggcttgtgccagtctcttaagacccagttaagaagcctttttaaaatgccttaaaaagccaactcatacattaatcaagttgagccctcatccatacttactgcaatacatcaattactatgtctttttttaaaaataaattccagttgacagccgacaccttattaaggcccactaaaatgatacaataagtagaaggctattaatattgctcttttttttctccttgctattgtcttgctgcaccggtctgcaaacaaattcaggctgcattacaattaatgccagtggaactccttctaacgacttccagcttgctaattttttacgctaataataaaaaaaggcattgctatgcaagaacgacccccttttatcatgctagcatagcacaccagagagtgtctgctattgttcacatgaaagacaattaaaccctggaacatcaaacctaaaaatgacaatctgctaaccagcactgggcattgctcagtgcttttctctatttcccgaactgatagaaaacaattctctgaagacattcctttcctattctcccttaaccaccctttgggaaaaaaaaaaaaaagaaaaaaactttaaaaaatacgctttgctgatttatgcatctctgcttagaatttattaactgtctaggaccaatttcacttcaacactcctattgcctgcaggtttaaattctggacacataaaacgaaatgcaccaatatcacccacatactatcatatttaaaaataaacattaaaagtattctttaaaaatgcacacaatataaaagtctagaaagagaaagaaaaatctaattctgcaactctgtgtatctcatcttctctggggaccatgctagagagtcacagggcattctgaaaactaagtctagtccagaagctaatttttcacaaagccagatttaaaaaaaaaaaaaaaaaagtcccttcattcttagcaatataaggattcattcaccaaaaatgacacgcccatttactggaaaaataccctttatttgaactttaattataacatacagaatataaacatacccacataaaagttcactaattttgttaaaaaacttttcaaattttcactaacatttcccccatggtataaggagaaataaaataagtcagaaagtctgagttgcaaccttgcccctgaaacctgcgaatcttgggtctcaaccaaatcttgtaacctctctgagcgtcagtttcttcatttgtaaaataatgagaaaaatagctcctttttcaagcacaattgtaaagatgaaatgagaagacggatatgaaaactctttgaaaattaaaccataatacattgtaattaaaataaataattaaggctgggtgcagtggctcacgcctgtaatcccagcactttgggaggccgaggtgggtggatcacgaggtcaggagatcgagaccatcctggctaacacggtgaaaccctgtctctactaaaaaaaaaaaaaattagccaggcgtggtggcgggtgcctgtagtcccagctacttgggaggctgaggcaggagaatggtgtgaacctgggaggtggagcttgcagtgagctgagattgtaccattgcactacagcctgggcgacagagtgagactccatctcaaaaaataataataataaaataaaataattaattaaatgaagttgttgtacgacctcactagagttgcactgaaatctttttctgattagtagtgagtgactctcaaatgctgggcatgggcagacctaacatatttactcagcaagatttggtaaaggggccaggtactatcctaggttcttcacatttggcattttattgcattctcacaagaactctcttggcagggatgatcgttctctgattacaaatgaggaaactgaggcctagggagatttggtgtttggcctaagtggcagagttgagatttgaatcacagtactgatcacatagaagacactcaataaatgtccccagctgtgacccattcttaaggtgactttccatggtaagcatcttgtaaaagagagcagttctgtgaagccaggttaagagatgagttcaggcaacctgtactgatatattggctctgaccctagttggcatggacctttgggccagccattaattcctcagttttgcatctgtaaaatacaggggtttttgtgagaatcaaataagtccatgtataatgtttagaaaaatattcaataaatgtgaatgtgtgttattactttatcctccagcgctgtgtgagaaactctactttgtaaaataagcataaaataggatcagtagcttccacatttaaccaagataaagcaacaaggaccagacttaccctaccatctaaaataataaaaacacaaacaaaatatacagaacaatgtgtaagatcctagagcaaggtaaagagatatagtgatctctaagagattagaaacaaataaggtaagacctatgatcatctcagcttacttccttgagagaggctccaggtcaaatgcaaaaggtgaagtcaggcagaggccaacagactccttcaattcaggagacacatctaaaaggctcaggaaatcaaggcaagtgtagaatagagtactagagaagatgttgctgcaaagatagagaactccagagatttgcagatagtccttttcaagtgttcaattgaatattaaacagtgcatgcatgcaaggaaactattgaaggctgggaaaagaatcattaaaaagtttagaggtactagtgcccagtgcttacataagactaggaataatgcttgctctcatcacccagattggaaaaacctcatgattcatgggacattgggtggggtacactgacaggtctttactcaaaaatggtaaataattagctgtagactgagccctgttccagtctacctaacaaatattaaaagtaagaatctaaaggatgaaactacttccaaataactgcatcccagaaaaagctaaggatattaacagaaatacaaaatatccaacatatgagaagatagaattctcaatgtctggcatccaatcaaaagttaccagtcactcaaaagaagcaggcacatatcatccaaaagtgagaaggaaaaaaccaatcaattgaaacagaccccaaagtgacccagatgttagaaacagcagacaaaggccaggtgcagtggctcatgcctgtaatcccaacactttggcaggccaaggtggacagatcacttgaggccaggagttcgagaccagcctggccaacagggtgaaactccgtctccactaaaaatataaaaacttagctggcaatggtggcacatgtctgtaatcccagctattcatgaggctgagacagaagaattgcttaaacctgggaggcagtgttgcagtgaggcaagatcgtgccactgtgctccagcctgagtgacagagcgagactctgtcaaaactaaataaatacatacataaaataagaaaaaggaaaaaatagcagacaaagacattaaaacaattattataactatattttatatgtccccaaattggaggcaagggagatttataagcctacagattagtgaagctctgcagatcctcaaataagaaacataaagaaaatgacaccagggcatatcataacctagttgttcagaatgactgataaagtataaaatcttaaaagtagccagagacagaagacactacatggagacctgaaggtaaataaaatagagatttctcattggaaagagtgaaagcaagaagacaatatattggaacaatatatttaaagaaagaaaaaactgtcaactgagaatttgaaatatagcttttaaaaacaaaacaacaaaatatatttgtacgtatatacaaggctgaaatgattcatcgcaagcaaaactgcaatacaaaaatattcaaggaagtccttgttacagaaagaaaatgataccagatggatatatgaatttacacaaaagaatgaagaacacaagaaatggtaactaggtgagttaatttatttgctattattattagtacatctctttaacaatgtactgtttaaacaaaaatcataacgacaatgtagtgtggggtttataatatatgtaagagcaaaacgtgaaaagaatagcacagaggtcgagggaggaaacatggaaatatattattgtaagtctcaaacaataaatgaagaggtacagtatcagttgaatgtagtctgtgataagtaaaacatgtatactataaatcctaaaataataaagcaaagagttatagctaataagccaaccgaggtcataaaatggaatcataaaatttattcagttaatccaaatgaaagtaaaaatatgaagagaaagaaaacaaaaaaatgaaataaataaaaaataaatagaaaaatgctagatttaaacttaaccatatcaataaacacattaaataaaagtggtttaaatattctaattaaaaagtaatattctatagcattacagggtataattcacaataatttattgtatatttgtaaatagctaaaagagcagattttgaatgtctccaatacaaataaatgctaaatgtttgaagtggtgaatatgctaattatcctaatattgatcattacacattgtatacatgtatcaaaatatcacactgcatctcatgtgtaattattatacgtcaattaaaagtactaaaagcaaaaaaaattttaacagtagagattgttagattggataaaaaagcgaaattcaactatatgtttcccacaaaaataaatacacatgagaaaaacctttgtaatctgggatagtcaaaatttttttcttttaggtacaatatgaaaagcataacccattaaatatcaaattgatagacttcataaaaattaaaaatgtatactctttaaaagacactgttgtgagaaggaaaagacaagccaacactagcagaatatattgcaaatcataaaatcaaataaaaggtttatatctagaatacagaaggaactatcaaaactcaataacaagaaaacaaaaaacctaatacaaaagtaggcagaagattagaatagaaacttcaacaaggaagatatatgaatgataaatgagcacatgaaagatgctcaacatcattagtcattagggaaatgcaaattaaaactacaagatactactacacatctattagaatgaatacaattgaaaagtctgactaaactaaggatttggagcaagtgtaattctcatacactgttgctgagagtgtaaagtgatactactttggaagacaaacagcttgacagttttctgaaaagttaaacatacacttaatatatgatctgttctcaggtttttaccaaagagcaatgaaagtctatgtccatgcaaagacttgtaacagtttcccttttttttttttttagacagaatcttgctctgttgccctggctggagtacggtggcgtgatcttggctcactgcaacctccgtctcttgggttcaagtgattctcctacctcagcctcctgagtagctgggattacaggtgcgtgccaccatgcccagctaatttttgtatttttagtagagatggggtttcaccatgttggccaggctggtctcgagctcatgacctcgtgacccccccaaaagcccaggctaaaataacacaaaaatccactgacagtaacttaataaacacatcgtagcttatacaatttgatggtacctcagtaataaaaaggaactaactactgattcaacaacatggatatatgttaaaataattatactgattgagacaaaccagataaaaaagaatatatactgtaggattccacttacatgaaagtctacaaaatgcagacttatccatagaggcaaaaagcagataagtgattagccttgagatgggggaagtaggtcagtaaaggggtcagagaaaaggattataaggtagcaaaagaaaacttttggggtgagatccccgtttattacgttgattaaggtattggtttcatggatgtatatgtacgtcaaaatggatccaattatatactgtaatgtgcagtttattatatttcagttataactcatagagctggtacaaacaaagataagattattgtccataaggaatttaaaagttaattattgaaagaaaatatatgtacaaaattaatgtaatgaataagaagataatataaactgttttgtacaaaatacatgaaaaaaagtagagaccagtgattcttaaactttgatacccatcagaattgcctggagggagtgtaaaagcatagattgttgggtccgatgcccagagtttctgattcagtaggcctgggatggagcttaaggatctgcatttctaacaggctctctgtgaatgctgatggtgctggtcccaggaccacacttttagaatcactgatatatatgagaataggacaatgtagaataaagggccaatttagaaaatagagaaattatagcattttttgaaaagctttattttttccttaagctcacaatgaaatagaattcaagtgaataaaattttattttattctcagaatttctttccttcaaaatttttctatgttcctactgaaaattccacagttttcaagtagatctcatactacctagttgcagaattcactggcatagagacagtcaatatcctcttagagagcaattaaatatcaaaccagtgaataagttaagaatagggcaagggtatagtccaattagtcaaaccttttatttccactttctgccatattttcaattattcttctcctatacccttttgagaaatagttattattgtaggtttaaaataaataaaaatagtttttctttctcaggagtcatgggctttgttctttgctattccctctgcaacactttttgtcctacctgctcactttcatctggctaattctaatttgccttttaagcctgggatagacagtacctatttgcagaactttcctgggcatacttctgctcaccctgctgcacaggaagctcctactctgtgctccttgtctctactgcatccgccatcttgcactaaatcattttatcacactcatcacattttttctacttcttagtgtatttctctttaatttaatgaaattgcatttgggacatcctagcttccctgatcctctctaagttacacagtgttaggaatagagaaggaggagtcagaggtcaccaaagctagaatcataaaattggagagacagaacatgggatgaaattgtaaatatacaacatacacttgcatacaggcacatacaaacatttggggggttgttaatgacttccctaaggatagtaatttcaagtggcaccaatctttaacccagattgaatcacaggacaaatcaagtttcccaattcctactcatgcatttgacatagttatggtctgcttttatagcttttgatcacaatttcctaggaggcagctggtctctaaatcaacaagtcagaaaaaaaaaaaaaaaaacagccaaagcccagtcctttaacaaaattacctattgaggaggtcaatgctgtttggaacacatttaaaacatttataagagtgattttttaaatgtctgctattggatgagggttacattcaaagattccagttgtacttttgtatgacactagacttctgctgtagtgcttcacccaaaacagaggtttaaggaaataaaaaaacaaaaataatacagaaaaaaaaaaccaaaacactttactgaaaattttcatttcaaccagaagcaaacgtgttctaagaaggcaaagtagagttaggaacaactccgtgtttccctcaggaataaacgtgatctttcacacttgggggttgatagtcagcgtggagtaacagaccaacttaagaaggaggcatctggggctgttcacctaaggagatgcttcccagaggcccagcatcttgggagaacaccccaagttctctggagaggtcaggagtttgggatgcaggatcacactgaaggtcagcccagcaaagcagctgatctaggatatgggcttctgacttccagattctaccatcatcacagaggctcaaagctggggcccacaccaaaagggcgtgatgattcccagccttcagcacaacaggaattgacctggaaagaaaggcctttattcctctgacagaaaaacctgattcccaaaggaaaatgatacttttaccttattccctttctcagtggatctgcattttcatgaatgaagaaaagaagaaagttgaattctctgactaggaaggtttcttataagaaggtttccaatagacttcaactttttaaagctgtgcagcaaaaaaaaaaaaaaaaaaaaaaaaaaaaaaattaccacaaaggaataaagagcactaaccaaagaaatttcactctcatagattttgtagcacctcagaacttcctttggaagggaaggacaaagcggccgtttgctcagctcagatcatttggattgagactcatatgttattttaaatgaacattgctcaggtagttaagccttaaaaatcaaccatccttgacaactgtccatttttttttttaagtcttaccttaagggtttaagaaacacatttacaaagtatgctgtagtgggaactagccaagcttcctacctggcttcatagcacaattgggactgctggtctttgttcatttttgtctttgaaaactttgttacagttaaaagagggaaaaggagtaaacttaaaaagcaaacatggaacacttgtttagcacttggaacaatacaaaattccaatgcacattaaaaatataatccaatggaccatttaattttcaagattttactttcaccccttgactaataatgttaagaaagtactgaatttctctcgtgatactagaactgtcttttacaatggcattccttttgagaaatcagaactaaagttttctttgcattctctatgtgctgagtccctatattggataatattagcatcttttatatccatacctaatataacattcttttttcctatattgtacaagttccagagtcttaacgctttatagtagtgccaacaaaaatgtttaaggaaaggccatccaaaagcagacatgacattttgcagagtcttcagtttatctttagaatgtataattataaactgtgcttgaaataagctgcccagatatttgtgttaacacagaaattctgttaccattagttcttgctcagtaaatgcaaatattgtgaacatgctgtttaacagcagcaaatatcatgtctcccatttttatgaaaagtaatactgtaaaacatgctatcaagtaatcaacatatttattaaacagttctccatacaagccatgtacatacatacacacattttattggacagtgtagtaagtgaccacagttgaagtgttcacatccaatatcatacatatgtacatcccctttatatggtgcaactatagcaatacaatgacattttaaggattgctcttattgttatttaacatatatgttcttatcaatattgaaatatatattttttaggggaaagcaacaagcatgtacattagtttctacggaagatctactttcttaaaacaaccatattaaaatcatatatactagctctccaatgtagcagaaatatctatatctcatgatatctttatctttctttgtttctttctttctttttttttttattttttttctttgagatagggtcttactccatcactcagctggagtgcaatggtgcggcctcagctcattgcagtcttgacctcctaggctccggtgatcctcccaccttagcctcctgggtagctgggactgcaggtgctcaccaccacacctggctaatctctttatcttttaaaacagcttaaagtatgtccatatttcttcctccacgtggcctttcttacagtcttcaaactctggcatccatggttagattttctttcattttttgatgtgggttttcaaacttaaaaagagagtataaagtaatctctcttctttattttctgctacatagacagtttttaactttaaatattttacatttccctaattacaagtttctgtcattttcttcatcagtcttcaaactatgaaatgatgaaaagatatatttggttttaaaaaataaaatgatgaaactttgtgatactggtgctcttcttcaaaggcctttgagtcttctgtttcagtatgtatgcaacgtgcatgctgacatggtctcaggaagtatattagctgcaagaataactatctttgcattatgcatatgggaaaactgaggcacagaacaaaatcacttgtccaacatcttgtagaaactgtaagtgtgcacagaaaataattgagagggagatataatttaattcaaatcacttatcaaaagaattctccttttgctttgataatatttttctaacctctcctttttacacagccaaattctcagcaataaccagaaagtcaacccaaatgtcattatcttaagtttataataattttaaagtttgggcagaaatttctcttcatatattcatgaagaaagtttcctgtaagtaaatgaatagtgaaacaaatttgcgtaggggatatttaactacttaagataacatatctttgtgggtccctgttaatttgaaagcaactatttcactgcagaaaaattgataagcaatcattcttaaatttgtaagaaaaaagactctaaacatctttattagcatgctttgtaagtccaagtccaattctgtttatttgagacatttattttatcaaccatcatctctccccgacctcttctccactatactgtaattccatggtgctaaggttattttttcttatcagtgtaaaaattttattttctaaattataatacagcataatcaacacttattttggtgtacagccctatgaatcttaacacatgaataggttaatgtaaatatcacaagaatcggggtacaaaacaatgccctgccctacaaaactcctactagcaatccctttataggccaattgcctgtcacccctaactcctggcaaccactgatctgtctccagcactacaattttatctttttgtgaatgtcataaaatgggatactacagtatgtcactttttgagactggtctctcactcagcatgaagatttgtccaaattgttgtgtatattgatcctttttttttttttttttttttttttgagacagagtttcactcctattgcccaggctggagtggaatggagcgatctgggctcactgcaacctccgcctcccaggttcaagccattctcctgtctcagcctcccaagtagcttggattacaggcatgcgccaccatgcccagttaatttatttgtatttagtagagatggggtttcaccatgttagtcaagctggtcacaaactcctgatctcagttgagccacccacctcggcctcccaaagtgctgggattacgggatcctgtgtgccaccacgccaggcagatagtttgttctttattattgctgagtagtgtttcattggatggatgcaccacagtttatctatccattcacccttgaaggacattcacattgtttacagttttggacagttacaaatagcgctggtataaataattatatacagatttttatgtgatcatccattttttatttctcaaatgtaaatatccacgagtgggatttctgcatcctacagtagatcacttttaactgtatttaaaaagggctgaattcttttccagagtggctgtttcattttgcatttctatcagcaatgtgtgcaagtttcagttgctctacagtctcatcagcactaggtatagtcacactttaaaaaactagccattctagtgatatgcaataaatttcattaatattttaatatgcattttcctcataactaatggcattgaacgtcctttcatgtgtttatatgcatttcatatatttcctttcttaaaatgtctgttcaagtcttttgcacattttaaaattaggttgttagttttcttactactcagtcttgtaaattccttatttactcttgttatgagagctttgtcggctatgtgctttgcaaatatttcctctcagcaagagaattgtcctctcattttcttaatagtgagagtgcaaacattttaaattttgttggagaccaatttatcaattttttgttttatggattatatttttagtgccatgtttaagaactttttgcctaaccctagataatgatagttttctcttatgttgtcttctaaacgttttatagttttatgttttacatctagatttttgttcacttttaagttttgagttaatttttgtataagatgtgaggtttaggtgaaggtttaactttttccccctgttgatgttcagtttttccaacatcatttgctgaaaggacaaaattgcttttgtaccattgtcaaaaaataattggtcatatttatgtgagtttatttctggattcttgttgaggtctattggtaattgtctatttcaataccacatggtcttgattagtgtagctatatagtaagtcttaaaatcagaaagtatgattcctttaagtttattctttttcaaaatcagttcagttatgctagctcctttgcctttccataaaaactttagaatcagtttgtctatgtccacaagaacatccgcctaggaattttatagaaatttcattaaatctattgatcaaattgggtagaaccaacatctttactttgttgaatcttctgattcatgaacatagtgtatgtctcaatttatttaggttagatagtctgtgatttattgcatccatatttgtagttttcagcaatagatcctggaaatattttattaaatgtataactatatatttcatttttggagctattataatttttttaaattttttaagtgcactttccaattgtacattgctagtatatagaaatgcaatgatttttgtatgttaaccttgtaacctgaaaagttgctaaattcacttattatgtctaagagatttttggaattttcttgggattttctacctagaaaatcaagtcgcctgtgttttatttatttccaataatcttctagtacaatattgaatagaagttttgtaggtagaccatccttgctttgttcctgatcatagggagaaagcatttagtgtttcaccattaactctattagctgtagatattttgtagatggactttatcaagatgaagaagtttcattctatgcctactttgcagagaattttatcatgaatagatgttaaaatttggcaaacattttttctgcatcaattgacataaacctgtcaatgtgctttttttttttttttctggaggattacattgattgatatctaatatcgagacagccttgcaatcctggtttacaaaataaacctcactttgttattacatgttattcattttacatcttcatttgatttgctagtattttattgagaatgcttgcattatggtcatgagaaatatttctttgtatttctctctctcgtctgttttgttgtctggttttggtacaagggttactctttggaggccaggattactcttctggcctcgtaaaatgaactgggaagtgttcattcttcacctattttctgaaggaaattttttggaattggcattatttcttccataatagtttggtaaaatacaccaatgaaactacctgggcctggagatttctttggcaaaaggatttttaacaataattcaatttctttaacaggtattggtttgcctatgttatcttggtagtacttcatgattttcaaaaaatatgttcattccatctacattgccaaattcctttacatcgatttttttcatagtattatcttattatccttttaatggttgtaggatctgtgatgatatcccctatttattcctgatattgacaatttgtgtatttcatttttttctttgtcaatcttgccagaaatttatcaattgtgttgatttctaaaaccgtgctcattgtttttactgattttatctattgtctttctgatttaaactattaatttatgcttatatctttatgagtatactcttcattctacttactttcagtttatttagctcttctttttctattttattaaggtggaaacttagagtattaactgaagatctttcttattttctaatagcatataatgctataagctttccctgtaagcactgctttagctgtatcacatacattttaatatgtgcattttcattttcattcagttaaaaatattttctaatcccctgagacttcatctttgaccatggattatttagaaatgtgttgtcaaatatttgttcagacattttcctatctttctcttattcacttatacattaattttgtgaggtcagagaacatattttatattatttcatttttttgcattttaaacattggttttatgaactaggatatagtctatcttaatgaatgttccatgctcccttgaaaagcatgtgtattttcctgttactgggtggagtgctctaaaaatatcaattagattcaattggttgatggtgttgttcagttcttctatagtcttgatgatttttttctctcttagttttaactattacagaacgaagagttttgaagtctctaactataattgtagatttgcctatttctactctcagttctgttagtttttgcttcctgtattttcagtgcacatttagaattgttacatatgcttggtgaattgattcctttatcaatatgtggaaacattatcatcctatagtcccctttatcctttcctctttatgtcgtagttgccatatatattagatctgtatacattgaaaactctatcattcaatgttaaatgttttgctttaaattatcaaacgatcttagagaactcaagaggaaaagaattgtctattataggtaccccaatacttactatttcttttgctgttctttcatccttgttccaaatttccttctggtattatttttcttctatctgaaaaatttcctttagaaattatcttagagctgacttgctggcaacaaattcccttaattctccttcatctgaggatgtctttagttcaccttcatttctcagcagtatttttgctgaatatagaattctggtttggcagttcttttcagcaccttaaaatatgtgtcacttccttctaccctctatggtttctgatgagaaatctacagtcatttaaattgttcctctataggaaatgcataatttatctctgctcttgttcaagattttttttgtctttatttttgtagcattttgattatgatgtgtctgaacatggatttatttggattcatactgtttgattttcactgaacctgaatctatgggttattttctttctcctagtgttggcattttttggccattatttcttcaagtgtgttttagcaccacactatttgtcatcccattctagaactcctacgatgcaaatgttaaaccttttttttaaaaattgtcccacacatctttgagactgtttattttttctctcagtctggtttttctctgtttatcagattggataatttctactgatttattttcgagtttactgattctttcctcttccattgccattttcctattgagcagacccaataagatttttattgtgggttattgtattcttcaattctaaaatttccatttgatttttctttctatttcttatttcctattgctgaggttttctactttaactttgtttcaggagtgtttgtgactgcttgttggaacaatttttataatagtttctccaaaaggctgttagaaaagtccaacatctgtatcttcaaaacatccgtatctgttcattgccttcttgatgtaggttgaaatttttctggtttttcttaggccaaataattttagatagtatctgggacatttttaatgtgttttgagactatgtgtcttgcttaactcttatggaatatgtgatacttttgttttaccaaccaatcaaattgatgagtttcagtccacaagttccaactgaccttctcatggctatggtttcaaaactaggtcagttttcaaagtttttgcagttattcagatttttcctgtgtgtgcaccacccagtgtccagtatggtcataggtgcaggtggatctgttggtttaattctggaagtttttgatatgctaaattaggattggattctcactccactggggagcccaggagttcataaacatcttttcagtttttttttttttttttttttgacagagtttcactgttgtcgctcaggctgaaatgcaatggcatgatcttggctcactgcaacctccgcccccctggttcaagcaattctcctgcctcagcctcctgagtagctgggattacaggcgccagccagcacacccggctaatttttgtatttttagtagagatggggtttcgccacattggccaggctggtctcgaactcctgacctcaggtgatccacctgcctcagtccccatcaaagtgctgggattacaggcatgagccaccgggcccggccaggagttcataaacatctttatgaggttcttttcccaagctcttaaccaatggattctcttaattttctgttttcttggggtcctcttttcagtcctccaactagaaatctggggctttagttatcctactcagccacatatgcccacattttttccacacagtgcaaggagagagacagagacagagagggaaagtaacattgatgtgctccaccctcttgggaccacagctccactgaaatgagaagaagtctcctcttcctcagacatctggcccctgtaggcacctgttgccatcattgttagcacttggagcctgggtgcaaggaacagagaaaaaagaagagacggacaggagagaagggagggaagggaagggaagggaagggaagggaagggaagggaagggaagggaagggaagggaagggaaggggagtgggggaagaggggaggggaggggagggagggagggggaaggagggagggagggagtgggttgggagggagggagtggggagggagagaggtggaaggaaggaagggaggaaggtaggaaggccactctctgcctctaccactccttaagccaaaccagaggtcttctcctggacctctccctgtccacttctgggtttcaactatgagatcaagttagaagctaccagaaggggaacaatgataaactcactacaagcttaggggtatttccagttctgatctcctactctttgcctttcaaaattctcacatagtgactctgaattctgtccagctctcatagctcaaattcagtaggagacatagggtgaattgtgcttattccattatatccaaaaccaaaactcaggtaaaaaagtttcagattccaaactgaatgtattatgcacacaaaatatgagaaataaaactgctataaagtttgaagaataatataataaataccagtgtaccctcatctaacttaaaaacttaacacacaaactattccctgagaagctcttgtgtcttccatgcctagccttcttccttccatacagaggcaatcagtaacttgaccttaaaggtaaccattctcttgtatccctttatagttttatcattttagcatataactctgtgatgattaatattgagtgccaactcgatttgattgaaggatgtaaagtattgttcctgggtgtgtctgtgagggtgttgtcaaaggagattaacatttgagtcagtggagagggagaggtggacccaccctcaatctgagtgggcacatctaatcagctgccagcacagctagaataaagcaggcaggagaagatggaagagcagacttgctgagtcttctggccttcatctttctcccatgctggatacttcctgcccttgaacatcagactccaagttcttcagcttttggactcttggacttataccagtggtttgccaggggctcttgggcctttgaccacagaatgaaggctgcactatcggtttccttacttttaaagttttgggattcgaactgatccaccaccggtttccttaatctttaacttgcagatggccagtggtgggacttcaccttgtgatcatgtgagtcaattctccttaataagctccctttcgtatatacatatattctattcattctcttcctctagagaaccctaatacgagccctgaaaaagacagtgtttggcttttattttttacactttaactttttaaaattaagttttatatagaaaagtgcacagatcttgcttttagaagttgaataattatcccaaagtgaacacactttttatccattacctgatctacatataaagtatcgccagcaccccagagtcccctcagaccctctaaatcactatttctaccttcttccccaaaggtaaccaaaaggtaccaaaaggtaaacaaagatgctaacttctaatatctcagattatttttatctgtgtctgaacttcatatgaatagaaacctacagaacgcatgttatatgtttagcttcttctccctaaggttacatttgtgagatccaaccttattgcatatagcacagtggttgattttcattgccatatagtattcctatatatgaattctatatttatattatatttatttatattcatttattacttcattctcatgttgatgaaaatttgggtttgttccagcgttttattgttataaataatattatgaagatatttcgtatgtatcttttggtgcatattctgttgggtgtatacctacaagtgaaattgctgggtcacaggctatgcatatgtacagcattagtacatactaccagttttccagagtggttttcccaatctacactcccaccggcagatatgagcgttccagttccagaaggaaggtattttttaagacacaaacagccttatttagagggaaatatcatcatctagaatggatatcaggcaaaaatgaaaaactataatgacaatgctccctagacttttcttaaaccttgcccttcaggcttatgaccaatgtaatcactggaagattcccttctaaactgataaagctgaaggcatagaagaaataagaaaagccttaaaatatgaaataaaataaaggtatatgtttcctggaacagtacaatcttggattatcccacagagagattaaaatattattttctgataagatttttttaactgcaagtgctccaacctttaattaaatggttcaaagagacccaatagatcttaaaatgtaagtactacaaacatttttgaaaagttttaaataacaaatagtcacatatataaagttatgagctacctttcattactgacattctgaaggaaatatatggggctgcctggggaatgtttttgaaagtctcaaaaggccctaacctgccaaacaagaatcccccacaagcctgttataatgtcagaaacttccagtataattcccatttgtcttaaagaccaattgatcattgtatctagaatatatattttcagggaggtggaaacaacacaaaggaaatctactttttatttgttttttcaaatgataatatcatttttgtcatacctttttttttcaggggtgatcaatcaatgctgaggcatttgtacacttgcatcttatggttttggaaattgtgagatgattgattatggtcagtattattcatagaacccatagaaccaattgttcagtcatgagataactgacctgaagcagatttaaccagcaccgtgtcataaggctgcagtccactgacctacccgcagtcatgttaaatgctcaacatgaaacaatatgtaccctggttaaatactttacaccttttaatagaatcttcttgaacaaaaacaaatgcatagtgtcaaagatgaaggaaagtacttttcaaactttcccaagtaatgttaatgtgttgtctgattcgagaatctcttcactaatgtgtgtgtgtgtgtgtgtgtgtgtgtgtgtgtgtgtgatctatgaagcatggaagaataaaggtgtaaacaacattaccacaaaacaatatttgccctaatgaaaaccttagtctagtagaaaagcaatacatgttaatactctgttcagatcccccaattgtactcatcatgtttcattatgattatgtattcatctatctcattcactatactatgaactccttatggatagtaatcatctctaacccaccacctgtaccatcctcatcattggtctgtgcaagactcatctcatgttatatatttgttctcattcccctcccacaaaactgcaagtattctcattcatacgtgttaggtattcttgcaaagtatgcaatgcttttttataggtatggtgtttttttttgtttgtttgtttgtttgtttgtttgtttgttttgagacagagtctcactctgtcacccaggctggagtgcaatggtgcaatctcggctcagtgcaacctctgcctcccagattcaagcaattctcctgcctccgtctcccgagtagctgggactacaggcacgcaccaccatacctggctaatttttttgtattttttagtagagacagggtttcaccatattggccaggctgtctcgaactccagaccttgtgatctacctgcctcagcctcccaaagtgctgggattacgggtgcctatacatacatacaggcagatcaccgcgcccggcctatatgtatgtttttaatatatgtaaatggtattgtgttgtgtaatccattatgtttccttatttttttcattcagcactatgctttacagatccatccacatttgctatgtacacacctagaccactacttctaacctctgagcagtactccacatgtacacctaccaagttctatgtatccattcgtccagtgatggacacaccagctccttaatactgcaacaaacaccattgcatgtatgtcatggacagtgtgagaagttctttgggaggcatatcaggaataaaactgctgggtcatgcagtatgcatatactggctacagcagtctacagttctacaacctatgtgaggagtctcaaatttccacatttttgccaacatggtgttttataatacctatttctaatttttacttaattcatgttgttggaatttgcatttcacttaatgagtttaagccctaactatgccagctatttctttaggattcctcttctgtaaactgcctgatcatatactttgcctaccttttaaactgagattgctatctttttcttcttaatttgcaggcttctttttatacactagatactaatccctcatcagtattaggcactataaataatttattttgttctcttgagtattaactttaatatgttcttcgttaaatatacatacttaaattctatataaataagttaatgtctgccttaatttatgcctttgagatttaaaaaactccttttccatttgtagatcatgaagatattctcctgcattttcttctatttctttcatagttttaccttccacatttatctctataatacatctggagattgtcttggtaagaggcattaggaagaaacccagttttgtttccctccatgtagtaacattttcaaaaagcaacaatacacagtctgtcttttccccgttaattttttggtgccacctttagtaaacgtttcacaatttatgtttctctgtgcttttattcagtactattggttgcttgtcttttcaaaatgttcaaaataggctgttgaagaatactgttcaaaatactaaaaaatactgcaaaagtattaaattttaacttgataaaaatatggataaatggctaggagatctttattcttccacataagtttcagatttacgcatcgtatttatccttatatttcccagtacacggcatagtacctgagacaaaataggccaaataatacatttctgaataaaaaagattaaattacaactatgtagatggacaaaaaagcgctaggtgagcatggaggccaaagactacatgtgagatgagacaaactggattttaaccaacaatttggctttagcagggatagtttagttttaaaggcaaataggtgaacatatagctattgaaatatagcccatttatgtaattctttagcaaatctgctttgccatctgtctttgtctctaaataacttggagttcaagagtttacaggaggttgcactgaagctcaactttttggtaaatggttatggagcactgaactcactctcaaaagaacaaacaaacaaaacagtgctgacttcctgtccactgcaattcatctctctctgcaattgccatgacagtctctgattactgatattattatccccagaagatggttcatggaaattctcatcccctgctaggctgtcccagtttcataaagtgaaaatctggtcggcttactcttgaggggaaaaaaaggccaccaaaaaaaaaaaaaaaaaaaaagaagaagaagaaaaaggcagtttaaaaaagataccagctgccacgatgctgcattaatgcaaacacagcagagtgaagagaggatctctattttgctgtttcatttctcttcttcttttctactccttttgtgacaatatcaccagagagttaatggaagcactgttatagaattttctgagcaataaaatggctaccttccattattacctcaatcccaatatcatcctccctctagagtaggagaatttagcagcagtcttccctcttttaatctgtctccatctcccactgcccttttccaaatatggtatacatatgtgtagctacaccatatttaaactggcaaaatatcttggtggcaccaatgaaatcaataatacatcactaactaggatgtcctgaactttatatttgtgaactatatagttgttcatcttaaatgcctctgtattgacaaggtgtgtatttatttaaaattattgtaaataaaagtaaactactttaaaaagataaactaggctgggcatggtggctcacatctgtcatcacagcactttgggagttcgaggcggttggatcatttgaggtcaagagtttgagaccagcctgaccaacatggtgaaaccccatctctactaaaatacaaaaattagccaggcatggtggtgggcgcctgtaatctcagctactctggaggctgaggcaggagaattgcttgaacccaggaggcagaggttgcagtgtgccaagattgtgccactgcactccagcctgagcgacaacaagcctccctctcaaaaaaaaaaaaaaaaaaaaaaaaaaaaaagttttcatgcaccttaaatactttcagaacactcatttaggggattgataacattaatgctaaaaacaaaacccatgcagataattttgtctagcatttatcttacagatgaggaatataaagctttgaaaagcaaaataacttgataccatcattaaggcagccacccaaagatttctacaaagccagtttttattagcttatatccaaatgtagtttcaacactgcattcataattttctaacacacttattaatgtttcatttgactttaatcaggtaaatgttcctaacatattagtatttacatttataacaccaacatcagttactctctcctttttatttaatttagaagctattggatatattgatttataatctgtaacagtaaaacactaaatatggcaggaaagtatattaaggaatatgaggtatgaatccacaaatgagaaaaattggaattctcaaaatatattcttatttatattaaaagttttcaatgaaagacaaattgtaactattttacaaagataaaaagcattgctgacccactattactgaaaacacactagaataattattgccttttaatatgctctcttcctaccttaaaacaattgaacctaaagataaaatataaatattaattgaaaatgagttgttctgcagtcagccacggggaaaatccctaaaacacaacataaaagaaaaaaatgcataaattaaactggcaaagtttaaatgtttctacttttatgtacattacatgctttttataatgagtatgaataaatgataccaaagaaaatcttggtaaatattggagtgaaccagttcctaaataaaccctcaattttttttcaacatattccataatttcctcactaagacaggatattctccagatgtataaagactacagaaagcagatgcagattatcctcaaaataattgcaaagattggtagcttgtcaaatatagcgtcctcatctgaagaaattaactatagttagcaagcatcaataacaatggaaagtcatttttcagagatattaacagatgtaagctacatttcctgtgcccatgaattgccacaccaacttcctctggtcctcttctaatattacacagaaattaagggggagtggggatggagctaggggttggtggggagacaggtctggtagctatacgaaaggaggagtaaagaaaaatcaagaacaaaaaattttttttctatgtatctagggttcccatcaccatccttgcctacccttctgttgctacctcccagctcccccaacaacaacaacaaaaaatgggattcattttaccatattggtcaaggaaaagaatacctgaccctaatgataatccgacgttaaggaagccagatgtgtactacacaaatatatgaaaggaggataaaaagttatggacacattcaagcaaatgtttcaaggggaatgaagatttatggcataaatctaataggaaagatgtgttgtgaaccatctggtaactgacttttatagccccatacattagcatctgttgtcatgttttcaaagtacagaattccaaaactgtgctgatgagtcttctgaatgcaatgagtttgctatgcactgggtttttttttttttaatccttaagaaaataggcttggacttgacctctaaatgacattttgtatggtgttttattgattcacataagcactctccctgtgatacctttgtttagccctcacaaccacgttatgggcaggtgggcattataattataaccaccattttacagatgatgtagttgagttcagagagtgtcagtgatttttccaaggttatgtgggtgatgggtgcatagccaggaccttgagctatacattccttgatttattcacttccttagatggtccatcagctttgaaacaaaatgcaagctttgtcagctaccagagtatccatcctcctgtggctcaccagactgctctgaacaaggtgtaaattccttgagtggagagactaaggattctgagtgccttgcaaattaactttctcaggagaacagcaaagcactgttgaatgaagtaatgaaaaaaggaaagccaagtaattcctagcacctagaatatactcaacaacatgctagatgctggaataaataaacaaaatacagactgtgtcccagtaagaccatcaaaatggaaagtgcaaagtgtgagttgttataagaactgaattgttcaatataaacatatatatttgtgtagtcaagagtatctcacagagaagttaggatttcaactgtatttggaaataataaacttaatatcaatgcagaaaatgggtgggggtagaaggtagcttttaaacacactaaaaagaaagcagaagaaaaataatagagtttttaaagtagcattaaaaatgatctcagtaaaattgaaaatgtattcattttatttttaatgtccaagtttatataataagaaacctaatcacttcatactttgtcagctgtccaagagggaaatcatgttttgatattttcactcttttattttaagagtcacgatttggaaatcattgtctgaaaaaaaaaaaatgctctctaaaagcataagtctatattgaccgaaatctaccgctttccttatttaaactatgtggagtaccaacaatgtgctaagacaatggcagacccagaggcatgttaaatcctaagcagggtttgctcttaagatactttgctcaggctgggcgcagtggctcacgcctgtaatcccagcactttgggaggccgaggcaggcgtatcatctgaggtcaggagttcgagaccagcctggccaacttggtgaaagaaaccctgtctctactaaaaaatacaaaaaaaattagccaggcatggtggcaggtgccttaattccagctagttgggaggcagaggcaggagaatcgtttgaacctgggaggcggaggttgcagtgagccgagatctagccattgcactccagcctgggggacaagagcgagacttctctgagaaaaaaaaaaaaaaaaaaaaaaaaaaaagatacattgctcagtgtgattgccatgaacacttgcttaaaataaagagtttgaatatacaggttacagaagggagacagtagcgaatggaatccgagagattctattgcttcgatggggccataaagcttaagcttaatccagaggagtagacaaaaaggtaaagctctaagtctgtctcatcagagtccttttccattaggtatgtcttcctgctccaacatgaggtccctgcagtataaggtttcatcagaggcaggtagaacaattaattagctgctgctctccaactaatacaccccctaatggtagcaccacaaagattcaggggcatgcctgtaagagcagtcagttccaggtagttactgtgaagaatatcactgcaaatgaggatcaatgtccaacaccactttggaatagtaatttcttaattcttattcaaatctggaagcaagataatataacttgatctgaattggccatgtgatcctgatggcgtcctgctaatgggctgttcacttaatttatgtaatttaaaaaaattaaatagtcatattttaaatccccactgcagtccttcagaatgaaagtatgcatttaaaagttccagtgtctttataaatcagcattaccaaacttcttaccttgttgactatgttctcctaaagttttacctttgcttggctccccttttggcttaggagggaacattccagaatcccatcagcaagtcacttaaggctctgctgcaggaaactaggtttgtcaatttggttttacactgaaacataaatctcctgctttatgaatatatagtaagaacacagcatgctgcatgacagatatatttgcaaaaaagacttagatagcagggcaaatgccatgttcaaaagccaacaaaatcaaattcactctttgttacacacacgattccagagaaaacacatttcaattcatgaaacatttactgagagcctactatgttcaaggcattgtgccagctactgataacattatctttgtttttagatcaatttatttgccttggtctatgtgtgcagtggctgcccgaaacttccttaggcttctcgtgggttcaaggtttagaataatcatatcagcaaagggaaggcttgtcagaggccttcaaaacttctcattagctgctaaaatctttgctttgggcattcttcagtacctggagcagtcttctcagtttcctctagtctaggacaagacaactttctctggcaccttttgtcaaagatccaaagagaaatggacattacgtctcctttagaacatgcctgaacacagactggctgctttctgtgttgggctctgctgtaattgcagtgaggtttacagctgctttgttctggtttataaataatttcttaataaattaacaaaaccattggtgacagccacaggatacagcagtatgtaaagaggccggccacattccacacacatgttctgccttgttcttttgtttttctgtttttgttttgcatgtgtgtgtgttatgttttgctattatggaacaggaaataggatgaagtcaaatgactttgtattctgctaatcctctcctctcagcttgtactgggtccctgaaaggaaggataaatcaatcactacaccacatagtccaactattccaagtaggaggagaaaagtggctagatgacttatggttcagagcagatttaaggaaggcagcaagatacatgacagaaagagagagatgtttgattcatttaaataaaaatagaattatattaaaatctgtgttcatttaacatattcatttaatcatatataaaatatgtatgaacacataaggtatacactatatgagaatatatagtacatagtaaaatacacaaataggatatatgttcactctacagacatatggatatgcctgtgtacagaacaatgagatggagtttcacagattggcttctaaagatgtctggggagaggaggcatgggatgaggggtgctgaggagcaggtggagtatgaggaaccactagtctgagcagtttcattttatccatctataaattaaggctcccggttccaagttagattttgcttgggaaaagtcacccattctcccactattttttttttaatagtcatttttgtttttattgaatgttgatgcaatcttaaaggttttttttttaatgatttccatctatttccttattcatcaattttaatttcatcttgccagggattttccttaaaaatattctgagatcattttagattcataggaaagttttaaatatatttgtgtttcctttagtgtcttctgacgctatttttcattttttgctgctccccaaatatacgggctatctttttctcatataggttgatctccatgtggccctcctccctccctcagataaaacaagctatgcttactcccagttccatttccttccactcgttcaaccactactcgttaaggccaaactcatgcctcattcctacaaaaatcccttcttagaacctctagcctgtaaccatcttcgtcccttttttttaaaaaaaaaactccttttcctctatttgaccttccaattgatgtcatgggtttctgaagatactttccttgttgtgtaattcatttttatttttgaattgctagagtaagcctagtatgaataatctctgagtagacgtgtcccttaggtaggaacaaccagctgaacacaactgggatcttcttccctaccctgctgcagccaacctgaactatatgcatccacttcattttacatttcacttgagacaatgcactgtcctgtagggtcacctggagctgcaacagggaattttctctccgtatacctaactgaccagagcttaaaacaattccagatctcctgatctatttggctggataacataagaatgctattttggtgaaggtgaggtgatgttcatttaaactgatagctactgtctactattttaaatgcagtagaagatgtagtcacagaggaaatatatctaatggcaaacaaaacatataagaaatagaagccatctttgggtttgaaaaaagtatagtaaagaattggcaataccaacatcataatccatgaatgtgctgtaaatatgccttgaaaagcttcctcatcctccaatatgcctgtattccttcaagaagtcatttaacaactatttttattccacttaaaaattgcattttgtttttccattatcttaattactagattgccaggatccacaaatattttataacactgctttctttctttctatttattgattgattgagacaggttctcactctatcactggggcttgagtggagtggcatgatctcttctcactgcagccttggcctcctgggctcaggtgatcctcccaccttagcctcccaaatagctgggactacgggcgtgtaacaccatgcctggctattttgtttgtttgtttgtttgtactttttttaaatacagggttttgctatgttgcccaggctggtctcaaactcctgggctcaagcaatccacccgcctcggtctcccaaagggctggatttactggtgtgagccacgtcgccccgccccttataacaactgctttcattctttgggcagttatccacaactctttaagaaagtatcattttcctcacttttcagatttaaaaccgatcgtccaagtggcaattaatttgtccacagtcattaagcatacagagtagagtttccaactctgttctggccaattcaaaagcccagatcctcccacagaaccacgctgactcacagtttaatatatacagtatttcagctacatatcagttaagtaaactttcctggaattgccaaattatatatattacattcatactgtaggaaaatagctttttaatttcatggaactgatttcaaacttgaactatcagaactattagaacacaagcactttaaattctgagactctctatgctagtacatgtctgaattaggtcaagaaaaataggaaaatttactcttggttgttaaacatgctgtcgcttttatacaaagatgatattgcatgtacatcctggcatgtacttggaattgttccttaaagtgatgatgattgtttaattttttaaagagtatgtatactatggttctgtttatggaaccccatttttttctgtttgttaatgtaactgacctattcataaatgctttagaattttctgccacatgctgaaactcctacccacttcctctgaatggcttgttttctctctctgaaaaactacaaggtactcatcatcattgaactgtattaaaagatatacctaaatgcattcatatctctccatagaactttcatataaaaaggatagaaaacatttctttaaagccataagaagaagcactttccccatttaaaaatgttagttttcagtctcctggtgacaaaaaggagctaaatcttagatgcagtgaagttctattcactttgaatattcattgttatggtggtttctctgcctgattggttaaagaagacaacacaatttgtaattgacttttttttttttaccaccaaacaactaattttgtcttctaaaaaaagctctagggtttattaactgtgcaatcacaatttactgaggtcctctcatcaaattagccctgaaacaatgcaatttttcctttattttacttctatttcaagaagggctttccagtatgcctcttattaagaccgacagtcactctcctctaatttaggtgtttttctcatggcaacaattcgttattacagctgcagaatttttaaaatccaattctgggcttccttttccttatttcctatggcatcataaaatgtgttaccttcaaattgtagtaatctcaggctcttcaaagcaatatgctctgttgtcctttagaaaaaggaatttcaatctaggaataattcgctaaatttctgagactatttgcttgtttgtcttatttattcatgtattttacacttaggctttataataacaagcttcaataaactatagtgttaaaatctttttttttaagtgttcatttctttcagcatgtccagcaagataaatttactatagttcacctttctccattttacctacagggtcatgggattcgtacagactctcaccaatacctatatcaaaacttgcttctacagaatcacagaaatattctttatctagttcctagcacccaccttaacacttgcccctcaaaggaacagccaatatccccaatgccaaatgagtgtgtgaatggaaatccagaaatagagccccgaagatcaatagatgtgactgagaaagcgtttacgttctcagggctagagttcactgtgtttctaagtggatcagagatatgatccccagccactgtgaatggaaaggaaactagatgccatcagagggagatacaagtactaatgcagtgaggtaatgcggcaaagaatagaagagtcaaggaatgaaatgctgccctgaggaatcttaaaataagctcatccttgcatcccaatcctcagaagaatgagaaaaggtaaaggacagaatttcagagtttaaaacctttggaactgagaagtgtgaacttttacttcctgtgcctatcaactgaagttacaccctgagccgttgtagtgttatctcagcatgtttccctgcgaatgtaataagcgaaagattgctgacatccttccagtttggtgggagggggtcaaaatgctgactctccacactgagagatccagcaggggtggccctgacacatattctgactggacatttctaagaaggttgctgaagcacaaatttcaagccaaaatgcctaggaaatggtcaacgtagagggtttttgcacatgctaggcacactgcagcaggcttttttgcagaaagcaattcagcaggctgtcaatcaaaggtcctgaggctgagaggccatggacacccacttctgaccttgctgggctatcaggacaaggagcatagaaagtggctgacagcaaaaatccccccagtgaaggaaaatgaaattaatctgtttataaaaggagtttctccattctggtcttccttgcaaacccatcgtgcaccatactctgatttcacctaaatctctggaagccaaatgaggtgctgtcagaaaagtaaaagggcaccacttttagcaatttccacaaaagcaggtatttatagttttaacattttttttgttttgtttgccaacagtatttctcagtgggtaggacatctcacatatccactgatttcgctttcctgataaatcaattctcaataaatcaagtgacttctaggtgaatatatgtgaagacatttaagtataataattattttactgtgtatagaaagtggaggaaaagatgaaaaggtctctttttatttactttaaccaggttaaaaatactgaaatcttatatggagatagcccagcatgcagattgaataaagtcaatcttatctccacattaaatgactttaataggctgggtatggtggctcacatcttaatttcagcactttgtgaggctgaggtgggaggatcacttgaggccaggagttcaagaccagcttggggaacatgggaagatcctgtctctacaaaaagtacaaaaattagctgtatgtgctggtacatgactgtagtcccagtgacttggaaggctggagtgggaggatcacttgtgcccagaaggttgaggctacaatcagccatgatagcaccaatgcactccagcctgggtgacagagtgagaccctgtctcaaaaaaataaaaataaaaataaatatatgcttgcaataaactgaacttgattgcttgaaaatttgttgagttggggtgttttataaagcccatatcattttgtccttatgaatgaactttgatagattaatgagcctagtcacttattggaatacagccacaagctatgagctgcggatgcaaaagtgaatacaatacaattccaactttattgttcaggagtttttggtccagaggggaaatcttaaatataactgaccactatgatataataaattatgtgaccctatcactgctcctgttgggctggaaataacaaaatgagggttttacagtgaacatttattgagcaattccaatgtatagaagaataaactcagccaaatacatccccttattgccctcaccctgaaagtgttctccattgcctagatggacacatggatgcatcaacctgggacacatgacctgtgatataaaaacccaaactatgggagtcttgcctagaccaaataaacacacatgtagtttcaaaataaatacaaattcacacacatacacaaaaacacataaaactgtgtgcatgtctctcctatcgcactgtttcttttaaatgtttgtgtccctactatgcaaaatcgtccatttaatttccccacccaactcctgaaccttcgagtaataacttctagggaagaagaaataataaagaatgattacacgatcttatttgggcaaaaagctaacatatgggtatcaaggccaaaaatatggatttcaagaaaaaacatatggacgcccatatggaaaaaaaggtttcctggccggaaactctgttgttgcattttttatgcctatatgtatggtacagtttttcccttttcttgaacaacgctgtctgccgacagattataacattataaattcacatgcaaattttataaaatgctccactgttatcatctttattagattttttttacattctcttaatccttttcatcacttaatagctcaacaagtaatggagttttagtaaaacggtgaagcttattacaatcaatcctgtggctgaatctctccttgatgctcaactaatgaaacttacttttctccagaacctcaaatagaaaatcctttcctttgcacacatacacatgcatggggacgtgcatatgcacacacgtgcacatgcacacgcacacatacgtgagcagacacatacacacgtacatattaggtggctcacttatgatctggaagaataagcctgcttttgtcttgagaaactacacaagcttggcaacagtcacttgctcgtgctcatcagcttagatcctagacaggacccgtaccatagagatagcaaaacatgggtcaactaacaggtatactgtcaataaagtttccatcttagtctcttagaatttattcatggagaccttttttagggggcagaggaaataaagttatcaagaaagaagaggaggtttttaaggaaaacaaatatactcttagtgtggtgcccgctttttttttttttttttttttttgagatggaggcttgctttcttgcccaggctagagtgcagtggcaccatctcagctccccacaatctccacctcctgggttcaagcaattctcctgccttagccacccgagtagctgggagctgggacaacaggcatgtgccagcatgcccgactaatttttgtacttttagtagagacggagtttcactgtgttggccaggctggtctcgaactcctgaccttgtgatcctcctgccttggcctcccaaagtgatgggattacaggcatgagccaccgtgcctggctggtgctcacttttaagcaagtagattctttgtgagcaggtatttaaatttgaagttatataatgaataaaagaaaacattatttaatggaaaacttagtgtgccccttatggcattcagataattagaacataatgttaaactctgatcttagaatatgatactttaggggcaaatatatcaggcatgcctaccaagaaggagaccctctccctagagatctgtttattttgcagttttaaggggaaagggcatacttcctgatttttggtccctggagccctagatttctagtaagagcattgacttctgaaggttccctacagcgtttatatactacctctcctgggggaaagaaaactagcctctatgtaacaaaaaatcatattatggggagtttagctgtggtatttcaagctatgaggaaatatttcagttccttctatcctctttatggaagctaaagtggatgttgggggtttggaggacctcagttcatgcaggctgagtctgtaggatttgttctgaaccaatttataccaaccgtctagaaggcaaagaaagtagggagaaattaaattcagcgaaaggacgaagcagtggcaagctgatctatggcaatgaacacagcactgtcctcacatactttaacagcactcagctattacagcaattacagctagcacatctgaattatttaatcgtcctctccaccacccgccctgcttggcacctctagaaccagaataaaagcccaactcctcccctcactctttgcgttcttaatatatgatggccaaccttgccttgttttaaggcgattttcttcagataaaggttaccgtgatcagtcattaaccatatccagtttctgcccacaagaataaagtccaaattccttagctgcacatttaagactactcacaatctggtcctaagctacccttccaaacttaggttcagtgattccttttgatatgtaccaaactcaacaaactatttgctattcgttgaaacaaaacaaatatgggaccggcttccaagcttttgttcatggagtccttgctgcctagaatgctcctccatccattctgtttcctttaacagcatgtattgagcaaacattctgccaggcaatatcacagacaatggaaatctattggtggccaaatacacacagttcctgaatggagggagcttacaatttactcaacatctacaccatcctttgaggttcagcaagaattactccattctatatcagataagactgaaattccagtgtctaatgtagtgccagggccccatgaggcacacaggaataaataggagctttaaggatataaataaaatgaactttaaagataaatcatgaaataattatgttgctattaaagaaatattcagccctccattcatccagttgtctatgtcatttgtcctagacacagtgtctggcaagcagtaagccatcaatacatcttcatttaattgtaaacaggaaaggacatatttccttccttcaaggagcttaaaatcttatagaaatgtataagatgtaaacacacaggcaagaaatacatactaaagtatgtatttctacatacatatttctaagtatgtagaagtacatactaaaaagcttattggaaaaacaatgttggcaaggaaaatgacatgctgcaaagtaaaataaatgtaaactttgtttagtgactgctcctaaaaggtacatttgaaggaaggctgcttcatgattactaagggaatcgaatgcaccaaactacaggaatcaaaactaattcaaacttattttctaaatgcaatgtaatgtttgattcagttaaaagagatgatatgatttggaattgagtcaaaacaacacattattcaatgattctggaaaggttttttccaaaatgcatgttggcttcagtgtgtggaaatgttgacctcctgacctggaacagaggcaagtgattttcattgtgtttatactgtggatttttctcatctctaatcccggtttgccaaattgagtattctgccccgattataacctatgttctgcttgactgtggatcatcctgcaaaagctataactatgggtcagatcaggaaactatgacctggtagtgaatttcatttcacagactcgggagccaaaatgtacacagtcttaaaaaaatagatgccttaaagccaatgctcaatttctcttttaaaggtctttggtcataactccctgagtcaggtaatttgtcctgcaaatattctgaaagagtcagaatcaacgagacaaacgcaaaatgaactacaccagccaggtcctatggtagctggagtgaatcatctatatttacacagcccctcaatcaaatgcttgggtagagtagctgtgtttatttctcttggtggcatctaatctctttattaagttcgttgtctttacagaggaactagcaggctataacttaaaggctctcctccttccctcctagctgaaaatcttatttttagaaagaacaaaagacgagggagctggggactcgggaaagaggcagtatggggagggaggaggaagagagcgattacttgccaaaccagcacatgttcaccagagaacacggtcaagtggtcaggagcagcactgatgttaattagcaatgaaatgaggaatgaaccagcattagcccctagactaatcaatgggaaaatcactccaagcagcagcttaatgaagtagtatacagctgtttatttttagtctgttctatcctgattcctcccccatccacgttaattttttttaaaaagatttaaacttgctaaaatatatttcttttcaagtctagtacagctctgatttatgtatctccattataattccctataattgctgtttttcaatttgtgtggacaaaccatgcaaattgggctggggggcggataaacccttgcaccatgccagaaatatgcttttttctttttcccatctttagatagacatccatattagttttattttctaaaacatcactgcatttccttgaagtgtaaaacagagctaattttttaataagtgcactgtgaatgaaatactgttgacagcaaataagaccctgtcgccattcctttcatgtgtgaggaaaattacttagaaaatttttgcttgtttcttacttttaaaaatatgactgtcatccatctaagagcaaactcataaaacctattaattaagacctattgatcactgggatttattgatagaaggcacatcatgacatatatggggatccaaaactaaagggccaattagggtgaaaaaatctttttcattttatcaggatggtggaaaaacagggtagtcagtttaaatagagtctctctttgagaattttttcttcagctctaattggaagataaaattttcctctgaaggatacaaatgttcttctaccttagcaagttccaataaactaaagggacttatcaaatgtccaaatattattcacaactctggaaacagtcttagagtcaacttttccttctaatgatggagatgttagtgaaagcacattcactagctatagtccgactgacctgaatgaaaatgtgagttacaggacaagggagggcaaggaaaagaaataaaagggacccaaaaagagctcttatcttgtgcctgtttttattttctccttccctttttctttttaataacttaacaagtggcagcattcccccatcatacagaataattagtgtttgcagtgagttcaaatggaaatcagaacttaaccataaaagacacaaaaataggtttccttgctttctctttaactagagattcaaaatccaaagtaaaatatcaggtttctccttgtactcattcgtctaccaagtccaagtgtaaacactgactttatttataccaagggtaagagtatacaaatgattgatttcttacattacatcacgacaaatgacatatacacaaattctctcccaaataaagtttatgcaaacctttactcatatctggaaaaaaataggctaaaattttagcagatcgatgctaagggtcattgctattaattgggaggaaagaagaactactcatgttactggaaacatcttctgatacttggcctgagcatcgtgattcagggccattgcaatttttcagtcatattttccatagaataaagtatcttgagaaaacaaaaacacaaacataaaagcaaacccactgctaaatgcaaacctgggaaacaacagcactcaggtaatcccctttataggctgatttgatagctcacggaaatcgaaacaaaacaccagtactagaacaccaacagctggttgggaaattgccacagattgttagggggagctgcaaactagagataggcaatgaaaaggttagaaatgatagttaaaaaaagacaaattactccaaagaccatattctttaaatcgctgaagcaaaacatgtttattcgatttgtttgtatgcctattacagaaatgctactttgggattctaggaacccagtctgtcaatttttcagtttctgcactttcatggttgattagagctgtttaatgcaaatacacttccaataagagatttcatgcccctaaattacacccagttaaaagcgaatgaaaatgtaaggtaaataactataatcagccatattatctttctcttggcacctctcactttacaggcatatttaaagacatctcttgggtcctatcctttttaacaagcagcagcgtatttcctggaatattacttaagatgctgtgcagtgaacattacacaggttaaaatgttacctagagacctagaaagaattgcatctgttgcagagccatctttttttgccacattttggaatgtctgagaagatgaaagggcatttgctgtggaggggatgaaaagagatgagaagagtttaagtttgtcttttatgtttaagttcattgatcagccgttgtgaagagcacagaagtttgaaaagtaaccctgggaagaaatgaatgaggaggaaagaaaatgtacaaatgagaaggacccagtggatttgccatacaaagtacctctgagtaaaaccactaaattactcttggggttgtggggaattgagatgccactggccatttttgccttagttgaccttttttgggtcagtagtttctcaaacatcaatgtgcctaaggatcaccttgtgaagtgtttaagattcagagtcctgagccaccctgagagatctggattaaacagatcaaggaatctgcatttttaactagcactgccagtgagtttgtggactacactgagaaaatggctctacaatgttaaaagcacacatattttttaaaaatgacaaatgccatttcaaacagacttacaacccatttatataggctttccctgcaaagtacacagttttgacttataatcaagcctacaggaatgtaactagcaagggagcaaaggagagcaggagattagaagaagaatcaataaatggctcaaatatgtgaaataaccttgttcatccaaaatacaggatggtggtgttctaactgtcatggtagggttcaattgcctcagttcaattttaggaaaactggcaatcatttcttttgcaggggacacaatttctgaagaacccagtcctttaaaaaaaaaaagtgagctatcaccccactattgagagagcagctactagctcagtattggtgtacccagatgggcagcctagcagccaaggaaacagaggtgggtctatgtactgtcccatcctgtcaccctttatcagtgagaccttgggcagagcctggctcatttcctggcatacgataggctttcctcatctgcacaatgaatatgcatccacatgttaaaccaccacttcgcaaattataaggttgaaatgagataataaagttgtgtccttagcacacagaccggaccgttgagaagtgcagggggaaaaaatcagaaagatctgattttagatttttagtcaaactaagcaagaggacttaacatttcagcaactcagtttgcaccatgaatttctccactcaatttatgagaattactattcccttgaagtgatttaaggaatcattaagatttggcagtggaaggtgggactcatttcatataccattacccttaagccgagactactataagaagttggtacatggccaggcacggtggctcacgcctgtaatcccagcactttgggaggccaaggtgggtggatcacttgagttcaggagctcgagaccagcctggccaacatggtgaaaacccatctctactaaaaatacaaaaattagctgggcgtggtggtgggtgcctgtaatcccagctactcaggaggctgaggcaggagaatcgcttgaatccaggaggcagaggcagcagtgagccgagatcatggcactgcactccagcctaggcgacaaagcgagactctgtctcaaaaaataaataaattaattaattaaagaagttgatacattatgttacaccattggccaagaggtagtcacagcttttataccctgaaagtgcatttggatttaatgatcatttagtgtttagaatttttccatagaaaccaagtcatcaatggagcctaggtttctaggtcactgcaccacagctatagaacacgtaagtaaatgaactattgtttttatgggaaaacatgtctatggaacactgggatacattttcttctactgttgtcccaggtggaaaggaaatcttaggcagtagggaaggccactgagccctagcctcttctgctcaatacactcccattagctcaagtgcctcaggggtagaacagcacattctctcctctggcaggatcctgagtcacaggtaggactggaaacatctcctaagggtctcaggagaagtagtaacagggtgtgactgaatgatcatctgtacatatattctttaaaaagaaaacatttgggctgttctcaggaaataaatggctaagaaactttatagataatgacaagaaagtttcagggctaagtactaaagacacctggactttgtttctgtatcactacttgaccactgtcattaatggcataatctgggacacttggaatttagtctttgaataaatattcttattagtgcgaaactttatagacaatgttgacgatgtttatattctttcatatcattgagaagtgatttaaaagaaatgcatttatgttatatttctactcttcatccactaattttagccttgaaaacaaaggctttgaagcagtctcaaaggcattgggtcgtctgcttagggccactgaagatgaggaagagaaatacttcatttatgttttgcaatcctaggacgcttaggagatcattttgaaatttcccctggaacagaatgtctgctaacattcctctctgacttcaacatgtgaacacttaaaggtaatcaccagccatggtggcagttataggggctctgcataagccctcttgcagccttgtttcccatctgcatacaatgcagttacagatctcacacggcacatacagaagctatcagagatactgggatgatgctaacattgatgtgcttatgagggaagacagggaatgtttggctaaaatccaaacaaaagatgggtgacagaagcagcagaagccaatcagcccaccaagaaggtgagtctggcagatgctggcagatacagaggcccaaaaggtagctggattacctacctgccaagtctctggatgtggagccataatgcactgcttcatctgagttatgtcttatgcataaggcttgtacatcagaatcactcactgtatatcacaatgcactagacaggtgttttccttcatccctcgcttttgtaaattcaacagttttgtcgtctctatatgctatccaaagctgcttaagaaatccaaattagtgattttaccctacagaatcaggagcttttataacctcattataaaagatttaaacaataaggcatggatatcccataaataagtgtttgttgcacttaactacagactttcatggtcaggagctacagagaagagtcaaagaagatgagttatctcaaataatgtgccagggctcctgggccgacaacttgcaaatctggaattttagagctttgccaaagacaaataaaaaaccctaaatattcaggtttgattcaggatgcttactgcttccccagaagcatggaggaagatatcgcccactcatgttggtgttcaggctgctgacactggaaagctcccagaatcaagcagtaatgggaacactccctgaagcacttagagaattgagcaaaattatatctggtgtgtggatgcaagagtgtgtgtattgtttggtctgttaagggggggcaagaattttgacctagtgtataaatttaatcctaagctatgtgccatattacctcaaacttttatatgaagagtcagcctcatgttttctctcttggtcccaaatcataaggaccttgacactttaaggagtggaccaagggtagattatataataacattttaaaccgtggcagcttgatcccctttagttacactaagggctcacaggtaatcataatacatttactatatctgtatctttaaattgcaaagtgtacactggagagaactccaggacatgtaaccatatccagttctcgtgaatctcagataatgactatgaagagaaatagcagaagttagaagtgcactaagggtgtcacattgccaagtgaaataagcttctagaatattcatgcagggagcccaaatttctcacttgctagctcccagctgtcaaaccagaggaaactaaggctagactatgagaagcaatcccagattcattgctgctgggggttgcttcttaaccctgtgatgatgtgcctatgttaacaaaacatgattggaattgaaaaactacatggagatgggctgggagagccaaaaactgcatctgctttgttgtgtgcatggggggtgggggtgacaggatgggtacagaatcagagtcagaagctacaaaactccttgggaatttatgtggtcccccaagtaaagaattagagagaattaattcccccttctcaacttcctgacatataggacactagatctcatttttaagagatacttctcagtatgtaactcaagttatgccttgtctttctgcttttactttttctttttttgagacagagtctttctctgcctcccaggctggagtgcagtggcgtgatcacacctcattgcagcctcgacctcccagactcaagcaatcctcccacctcagcctaccaagtagctgggactaccagtgtgtgccaccacatctggctaattttttaaagtttttctgtaggaacaaggtctccctatattgcccaggctggtctcaaactcctgggctcaagtaatgttcccaccttggcctcccaaagtattggggttacaggtgtaagccaccacaccagccttctcccatctttctaatgtttacctgcattctctttggcactacagctgtattcttaaaaagtaattagtggcaaagtgcctactgatacttcttttatttttttcagggacagggtctcactctgctgcccaggctggagtacagtggcatgatcatagctcattgtagtctcctggctcaagtgatcctcctgcctcagccccccaagcatctgggactccaggtatgcaccaccatgcccagctaatttattttttatttttatttttttatagagatggaatctcactaagttgcccaagctggtcttaagctcctggcctcaggtgatctacctgccattgcctcccaagttgcaggaataacaggcaagtcaatacttcctttttatatctgaagttcatctacatgatcttctcaagacatctctcccaactgctatttcctaagcttctaatttctgaatcatctctttattctctataacaatcctgtatggcagtccaggtggttctgacattaaaaatgagaatcggctgggtgcggtggctcacgcctgtaatcccagcactttgggacgctgaggcgggcagatcacctgaggtcaggagtttcagaccagccttgccaacatggcaaaaccccgtctctactaaaaatacaaaaattatcttggtgtggtggtgggtgcctataatcctagctacttgggaggctgaggcaggagaatcccttgaacccaggaggcagaggttgcagtgagccagatcgcgccactgcactccagcctaggcaacagagtctcgaaaaaaaagaaaaaaaaaaaaggaaaaggaaaataatgagaattatttctacctccatgacaaaagagaggagagaaaccacgaagtctcttctgttcatgctcccacatattgcccacatactcctcaatgctggacccattcttagcatctttgagagttctgtagtgagctggtaaatagtcccatctcttctgagacttccaccagctaaggaagcataagagcttttgaaatggctatgcagctccatgttgaacacaacactaatggctgaaacgacactcagttcctaggctgcactacctcatggaacatgctgatctactacatgaccacatgcatagcattggatctgccagcctttttagtggcagttctttactgttgacacatttggcctgtggttcacagtgactgctagccaactgaactccatcctgtttgcacgttcctacttgttgaaacagtacaaggctgtcattgtttcatcaagcatttatgaatggcctttgtgtgaaaagcacagtcctggggttactttcatagcccaattttaagggaacacctgtgcataattgtatacatgtgtttgttttcatgtttgtgtgtatgtgtatacatgtttctcagagctttgcaaaacatacctggaatcgtgtacactgttattctcttagtcttttgtgtgtcccaggcctataccatctagcatagactgccagtgctacataatgctgcactgcagggaatccctgtcatgggaaatgactacaggagacattacccagcatgttattcttcatggagtgctttttgaaagatcatgactcttgtagcaccgggccaagatcttttttaagctaaaaggcacttagacaaagagagccgtgtgtgtttgtgtgtctgtggctgtatgtgcatatatatgtgtggttgtgtgtgttcaagtgtgtgtgtgtgtgtgtgtgtgtgtgtgtcgggggactatggaggaaagaatggaaagaacgagattacaggtctgaggtgatatggttagaatctgattgctcagctgtaaggaatggagggtgtgaacatgattcacagaggaaacagcaggcagtggaaccctgtacagctggtccctgctggcctatatactcaggggatagactgaatctcatttggagaaatactcagagatgcagaagagaaaaaaaaaacactctgaagagtaagaagtgccttggggaattgaggatgaggacaggggatgtcctggttaaactaaatgcccctgacatgccatctataccaaccaccctctgcagctctggcagcatgctaccaggtatagatcattatttggttaaaaagacaagaggtaactctctgcaggatccaattatgttcttgcttggacacttgagcatttgttttaaggaggacacgcaaaccctggggcacaagagggaggaggcagtgggcctgattcaaagagcctgggttcccatctccactcagggaaaatccctgaacctcttgataattcagtaattcagtttcctcacctgcaaaacaagcatagtgcccgtacctaccttgcagggttgctgtacgtattaaagattatttcaaaaatgcccctagcacaaagggactcagtaagcagtaacctctttgaaaattcatcagaaggctacaagttttagtatggcatttactgcagctgcaatcatcaccccccccaactgataattagtgagttaataatttcttaattctctaaacaagataaacaacaacagaccctcacagatgacatagtaaaactgacattcctcaaataactcagagggttctacctgcagatgtgatgattctgcaagagacaagtagtttcatcaaaccctctgttaaacttcaaagtttaggggatattctggatattctggtaaatgtagtgtgagattgctaaaattaaacaaagtcattgaaaagcgcacttagcgtctgttataaacagaaacagcttcttttctcccaaagatactatttttccccccttcttatctctttactgctgggaactgctgagcttaacaaagtaaacttggctttacttatcagagtaagctcaggaagccctaagaggaggggcaacacaaacaccagagaatgagatgttcaacgagaagcctggaagacagctttccaccaacaactccccggctgtggcgtgatcattaggtgggttcagattttagaaacacaaatgtgtcatctgaattgtatgtgactgcaaaccccagccattgcttggaagtctacgacaaggcaggcattctggggttcgaagaggttgctgggatctttgcactgaacagtgataagaagaatgcacgaaacagaaagttaccctcttctgaactgcccaaggaaaattctgcacccaaaatgagattaagggcccagtgcagatagggcagcctttcaataccatccaacacaaaatagcattttatttcattcaaactaggatggtttcagaattcttgtgaaaatccaatataggctgaattttccttcatactgtatgtaaggaaagattagccaagcaaattaaagatacaaggaatactacagggacggaacttcaataaaccttaagactttcaacacactgtctgtaagcagatactccggctgcccatcacacacagaatgcattgcacacgccttactgggggcgacaaggctgaatgcaatcgggtctcagcttacctgccagcctcaagtccagacactccttcattcactaggctccagtcatgttgccttttttttttcctgttctttgaaccaccccagctcattcccacctccaggcctttgcacttgctcttcagtctgccaagaacattccaccctcaaatcttcacaggatcagctcctcctccttgttcagctctcggctcaaaggttaccccttaaagttcaaccctcctctgactgttcagttgttctctctcatatcctcagtttattttcttcctaccaccaccctctagaattctggatagtcctctttgtatacttacgtaataacggaacacctccactagacattgaggtctgtgagtgctggggctctgtctcctcgtcatcactgtagcttcagggtcaggagcagggtttggagattagtagactccaaaaactatttattaaaggaaaattaattacaaaatactaatatacctgttaaataaatttattcttcttcttttctttttttgaaacagggtctcactttgtcacccaggcttgagtgcagtggagcaatctcagcacactgcaacctccaacctccgcctcccaggttcaagtgattgtcttgcctcagcctcctgagtacctgggactacaggcacatgccactacgccctgctaatttttgtatatttagtaaatacagggtttcaccatattggccagcctggtctcaaatttctgacctcaggcaatctggccaccttggcctcacaaagtgctgggattacaggcatgagccactgtgctcagcgctgttaaagaagtttctgaaagatctctacctagaaacaatttgaggatatgcacagtatgtactagtgattaacaaaacatactttcttaaacttgacatttcagactttttcttagtttgaactagcgagctctctacctttcccttatatatcccctccattccatttcatttatctaaaatgaaagagaagaactatcaaactctatataaatataataaactaaaatcaatgtgctgctgatagttttatttccttaacatgactgtgaagcagcagaatatgctcctgaaaaaaatctcagtctccagactaaggtggagggagaggctaagtggtgacttgtactctcccaacccacacaatcctccagcatctaccggctatttgggcctttgtccatcagacatatggccaggaaagtacagcctcaattgaacagcaaagccctcccgtgcctcaccctagggatgcactctccctcctacttccctccctaccagccaaattgcctcatagactccaagacacattaacatcctggaaacaaaagatgggcattgtgaaaatacacttatcataatgaaaagattaatgtcacacactagtgattgacctgaatgaagattatttcctaggacatgggacccaacacctagaagagagaaagtaaagaaagaatccagggaatttttgtaatattacctacatccaaatgactagtatagaacttcgctttctctttcttaaagaagtagttcaacacattggttccctttttatttttgtacatttagagataaagatcatgtttctaaaacaagaaatgagataaagtgctaagcatgaattcatgcatagcatccagaggtgctgttaatgttttttgtatatattgataactgtctgcacatgtgtatatatttgtgtatgtgagtgtatatggtggggatgtgtgtggacatgtgcattaatttggaacactgaaaaagttggggtaggacccgtcacactgggagaatctccaagagctggaatattctgagtaggtaatactctacgttgtaaactgctcatgcagcaggactgaggaaaaggcatcgcctggccaccggctgttactgactctgggaaaatgaaaatacagcatctctgcacctgttcacctgatggtgaaggaaggaaaagccattaccgagtgacaggagacaaaaaaccaaaatccacttcagcaactcatcccactgctggtgattaatctcacactcccacagcctgatgcacattaaccagataattaataatttctttagggattccggctcggcaactgttttatcaacctgcacagcattaggagggagatgccgcacttgtgatcaaacgtctggaactgggaaaaaggactgtagatgaacagtgagggcttagcagcaatttgtgagcctacttcaaaatgaacaagtatggttaagtaatcctgtgtaattttttatcactactattggcctcgctgaagagccaaggaatagcgccttcccttgtacccctgtaactaccaccaccagtagatagctcacagacttgaaatcacatgtggtttactatgtgtgcaaaatagaatataccaggcatatctaaattctagatgcatctttttaaagagtgcataatctaagacacctcccccatcaaatcaaaagtttcaaagagtgtttgatcagaacaatgccggttgacgtatttcttgttcttgctggctctaattcacatctatctaaaggaagccaggcacaaagaatcgagatcaccctttctgagtcccctgtgcaaatgtacccttcttctcttatgttaaaacatattccacagggagaagccaaaacctcttttttatgtctatttttattaagattgtaagactatgaataaaatcttaagaagaataataaattataagcactgcttattaaaaggctcaccattaaaattccaacttattcatgttctttcctaatgagaaaaacagtacattgaaaatattattacaaatttctctcaactctatccagaatgctatttggatggaaaagaaacaagagtataatccatccttgtcggaagtcacagtggacttgctggcagaaaccctgggatgaggtctgcccactgtgtcttggtattatatcctccagctttcctgagggaagctatcataggcaggcaaacagcactctgcatggactttgccatgggagtgttaatcaggatggttggcaattacagagcatgtccaccttatgtgtacccaaaggagaaattgccctcagacgtcagggctaggatagtctgggattctcctaagagtggatcacgcagacaaggcaaaaatttagggctgagaattttggtgctgggaagcagtttagagccaaatcaattgtctatttccagcaaatttgcaggaccataatataggtattgtcacacacacaccaatttcagcttgctaggacagtctgcttttttaaccctgattttcagaggttttagattataccatatgtctttgtgagagtcccctcaaatcatcttggagtaaagtaagataatgaattggacaaaaagagagagaacaaagaaagacaaactaaaatattgggcaaaacacaagatcacataacagaatagtgagacctggaaggacttggaatttacctaatgttgttgggcactccctaggtacaaggcaatgtgccgtagggtacacactcctagaaaaaaaaaaaaacatagagcatcctctacaccacagatttcgctcttaaatttgggtttagggaacaattttttttcaatattaaaacatattttatggagtagaatgcaaatttcacatgcatacaacagataaagaggggattaaaaatttttttttgtttgctactggtcatttcaggccagatcctcacaaagcacacatatatttcctcgacctctacttttcgagtacatgggtagaaattctgagaaacatttgactagatcacatttacagaaaaggaaaatgagacccaatggtgtgactttgttgagccttagactctaaactgacggtaataatatttcactgggtgccttcaaatgtatatgtgaagaatatcatcatctatgaggcagtgataactataaaatctcaatcaaaagcacatgcaatttagattcacaaaatttcagttttcaccaagacctctacagccctcccctgtctatgaaagtaagagcacagggagtggcctggtggttatgagttaccaaatcacaataccatggatagtaaccagttcccatcaggtaacactaggccagaaagaactgacatcataaggtacactaaacactccttgaggataaaagccttatctaatttatttatttatttgtttgtttatctatttattttttagataaagtgtcactctcacccaggctggagtacagttgtatttttagttgagacagggtttttccatgttggccaggctggtctcaaactcctggcctcaagtgatctacccacctcagcctcccaaattgctgggaatacaggtgtgagccaccgtgcccggcctccttacctaatttatctgtgacttcctagaccaagcacaaagcttatactaggcacccaatatattaggcacgtagtaaatgttatcagaaccactatttgttgaatagagatctgagggacagattcaattaaacctaaaagcactaaattgttatgggctcttttcagaaatgaaactagcaccattaataacaacaagcaaaacccacaaatgaacaaaaacaaaagaacccagaaacatgaatgtgattcagaacaaagaacattggatgtagagtcataaaacctggcttaactccctgatttttaaaacattttagctatataaacttaaaggggataatttcaatcagatacatcctatttcctcattaagataaatagaataataatactaaccttacagtgttgtaaggaatgagtttatatgaatataagaaaaaaattgtcaagtaataaaatactaaaaaccattagttactatccattatattattgcatgaaaatgaaaaagtttggctgaaacacacacacacacacaaacaggcacacatacacacacacacacacacgcatacattgtgggtttttctctctctcacatggcttgattccaaagcaaactaaaccaagatccttacaaactagaaacagtatttttaaataactgcacatcatctcagccactaattatttttaggattttactatacgccgctaattgaaagtgttcagtcctttccattcattagttttattacaagcactccaatgaattaaagaaaaatctgccatcaccaccttccttgaaactttcactatattttcataaaagccttgaccttacaaaagcaattcacattaattcagcacaagtcacaggactggacagaggataaaaatttggcatttctaataaataggacactattgaataagtttgacagaaggctattatactcttgatgtcaggaaatggggccgacaatgctttctttgttacgatgaggggcatggcattatacatcactgactatatggagactctattggtggggccaaccaaatgtgtgaagtgaagcactccttaataggatttttactatattaaaaacttgcctgtgtacattgataagaattggactctgaaaagatgaattgcaaagatcactactaagaaagctttgagactataggcatgtctacattagaaagcaaatattcaagcacaggtaactctacacttcaacataaacgttaggtccatacatctgttactttagtttattagtagtaatcatttattgaataatttttcagtacagtgcactttacacatgtttattctacatttatttatttaatatacatcatcttatcttgtaggccttttaattgttatttaacagttgcaaagaaaaggaaaaaagcttggcaaaagtacattacagttgaaaacttattttcatacaaaaacttgctcacagatgtttattgcagttttatttttaattgccaaaacttgaaagcaaccaagatgtccttcagtaagtgaaaggataaataaactatggtacatcgagacgctggactgttattcagtgctaaaaagacgaactatcaagccatgaaaagacatggaggaaccttaaatgtggaaccttaaatggcacacatcatatgattccaataatatgaaaaggcaaaattgtggggacaattaaaagatcattgactgccagaggttgggcaaggaggagggaagaataggtgcaacacaaaggatatttagggcagtgaaactactctgtataatgttataatggtagctacatgtcattgtacatttttccaaactcctagaatgcacgacacccagagagaatgctattgtaaactttggatttgggtgataatgatgtgtcagtgcaggttcatcaatcgtaacaaatgtaccactctggtaggggaagctgataatggagcaggctgtgctagtgtcagggaggggtatatggaaactctctgtactttcctctcaattttgctgtcaacctaaaactgctctaaacctaaagtctattaaaaaaagaaaagacaggctgggtgtggcggcatatgcctgtaatcctagcactttgggaggccgaggcaggtggatcacgtgcgctcaggagtttgagatcagcctgggcaacatggtgaaaccctgactctattaaaaacacacagaaaaaactagctgggtgtggtgatgtgcacctgtagtcccagctactcaggaggctgaggtgggaggattgctggaggctgaggtgggaggattgctggagcctggcaggtcaaggctgcagtgagctgagattgtcccacagcactcaagcctgggagacagagcaagacccaccctgtaaaaaaagaagaaaagaaaagaaaagaaaagaaaagaaaagaaaagaaaagaaaagaaaagaaaagaaaagaaaagaaaagaaaaggagaggagaggagaggagaggagaggagaggagaggagaggagaggagaggagaggagaggagaggagaggagaggagaggggaggggaggagaggggaggagaggaaaggagggaaggagggaaggacagaaggaaggaaggaaggaaagaaggaaggaagcaagggagggagggagggaaggaaaggaaaggtaaagaaaaaaggacattaatttccctgaagtcttacagtcattcaagatggcagtagtaggattcaaatgtaggcctgtgtaatgtcaaagcctattttccttgtgcttatttatattttttaaatatttgggggatacacatatcttcactcaagtcagtctcttttacatctgtccctccccaaacacatttgtgattttattcatactagtaaataatatgtaattacatcctattaaataagcacctactacatgttcaattagatactactgatacaataatactttacaaatcatgaggtatgtccatctgacactgtgtgtgtgcatatataggtatatattttattgaatacattatacacacaattacatatatatacacacagtcagccttctatatccttgggttccacatccctggattcaaccaaccattaattgaaaatatttgaggctgggcatggtggctcatacctataatgccagcactttgggaggctgaggtgggtggatcacttgaggccagtagttcaaaaacagcctggccaacatgatgaaacctcgtctctactaaaaataccaaaaattagctgggcgtggtgacatatgcctgtaatcccagctactcatgaggctaagacaggaaaatcacttgaaccccagggtgtggaggttgcagtgaaccgagatcgcactactgcactccagagcgagactctgtctcaaaaaaaaaaaaaaaaaaaaaggaaagaaagacagaaaaacgaaaatatttgaaaaaaattgaatagttgcatctctactcaacatgtgcagactttttttccttgtcattactccctaactaatacattatagcaactacttacatagttttacattatattgagaaatctagagacgatttaaagtatatgggaggatgtgcatagttacatgcaaatattacactattttatatcagggacttgagtattcatggatttcggtcgggggtgggggtggctactggaaacaatccttcatggatactgaggaatgaatgaatatgcatcctttatatttatatttttccaatgatatcaaaggaaagtgtagaaaacattatgtttaatatttagggtttaaaataatgtatcattattgcttcacataatcagtggattgtggcttcgaagataggagacgtgggtccaagcgtgagcgctgcactttttccaagcttactcactctacggcccttgccgattcctcaagcgtgctgcatctgtttcctagttctaagatgggaataaaaatagcttccctgtctacctcagaaggtggttatgaatatcaaatgatgtagtgcgtgtgataagcactttacaatgtataaaactctatatgctgtaagtcattgttattaatgataattataaaccttgaggaagcctgagaaattagctatcattataattacagcagtagttgcaaggtttttacccttttctgactttgagaggtccacagttatatctaggggaattaggatgaggagaaaatttttaaaaatcaatgcgttttatttctatactaataaacagcaaactacattattatttttgcaaacagaaatgacaacatggaaagtaccggaaaagttcattccagtaggtcctggtcaagaaaaacctatttcaagttcttaaaaatcatattagctccccctccccccatcctttttttttaactttacactgtcttcctgtactgctatttccatgagctctgctatcagctgaagataaagcgaatcctttggcaggaaaagcttgagttctaatctcagctctgacacgggggattaataaacaaatatttgtaatgtttcctgaagaggaaaattctggttttttattagtattagcagcatattcatatgtgtacttgactctagtgtagtatcgcatatttaacattgattgttatatgagcctcatcacacaaatgaaatacaatgttacttataaaaatgctcactctttttcccattgtaagttaaacacattgctaagaggccatttttcaaaccatcagtggccctgcaactctctaaaaattttcagcatttctcagaaggaacgctcacataaaacatctcagtatgaaaaaaaagactttgaccatgtaaacatgtccaattgtctgctgacattaccaaaagaaactgaattgtacaattttcaaaagtgctcacttaatagtgccagtggtttgatcttgcacatgttaccccttgatacctcctctgccaagccagtagcgtacctgatgccagtgttcctgatgctcaacataataatctggcagtgctgaccatttgcatgaggtcaccatctctcccatcctaatgcagtctatgaagcactggccaccataaccactgtctgggcggaggacagagggattcaaaagacagacaggcaacaggaaacataccctttacctctttccttactccatccagaagtctcaggctctgaaaaaatgttcacagcacaggagggatttgtttttaagtactagtttcccagacctttattcaaagatctaaatataagttgaagaaactggagggagaatagtactgctagtcaccagtgtgtgccaaagtatgtacacgatttccaaatttctccctcaactctccatcagtaaacatgggagggtccccagaatctcttccatctgctggatttcccttggtgtgactgccagagattgccacaccacctcatgaattgcagcacacattctgtggttactagttacccaggaagcttctggctcaccactgtgtggggcaacttgaagaagacaaagaagatacataaagcagcaaggtcaccactgctctgcatctgaaaggatgcccaagagccaggtggtccctcaccctcgcatctgttggttggcatgaagagtccaaatatgccaccacaacctaggaaaaaacaacctatgagaaaaaccaccacacattcctctctccttaaggaggctgcagatggggtggagaggaagaagggagaaggtgctctttcaacactttgaacattcaaagttcaacactttgaacacaacattttgcattcatacaaaatcaaatcaatctaccatccaacccaaaacagccaagatagctaaaacaaacaaacaaacaaacaaacaaaccctggaaatgagtacttgattacaaagagaaatctgaaccgctgttacagtagcagatgcacaggatgcaaggctgcatctactgaagacagtctcccgaggaagactggaaaaagagcagtgttaactgacatccaggtaatgctgagaaaagaacccaggaatgtctatttcggcaaatcaggagcttgctgtgtgcaccagaagtgctgatggtatcacagcgtccttcttcacacactgtactaccttgggcttccaaaggaaacagccagtgatagtaccctcgttggcatgcagtgtgacagttcacatccaaactctaggagatcttgtgaactattcgccacgggagggaggaagatggctatcttcctttatatcgtacttttaagaacttttagtcatttgtgattctttctctaccactgtgtgtgtgtgtgtacatgtgcccacccactctcctctccctttcagccccaattcaagcattaacctttgatgtaacatttttgctcctcatcagaatggaaagaatgagcttcagagaagcaattgagttgagagaataaaaaagatgacatcacttcaaacgtggacttgccagaaaattatcatttcaagtgctcccctgtgttatcagccagggaccctcagctctccctgaccgctgcatgctgcccctgtttcaaatcttttgatcaccatttgtttcatgtcaccgttcatcatgccccgcatgtgtgtatgtgtgtgttgaattgtgtacttttcaaagttcctgtcagtgctaactttacaaactcccaagtgaaagacaggaattcattagcatccgttattagtttgataattctaaataaagtcaatacaaacatttacatggcatttgcccaggaagaggatgaggaatgagaatttggggacacatgctcatgttctttctgatacatgcaccgccaggcacgcgcagcaagaaggccctggggatgggtcctataccactgctgtgttcctcttttcctctaaagtacaaagtaaagagtcttctaacattttctttttcagaattcattcatgtcagatgtagaccattttgagaagtgctcaaataccacgggatcccattcctccactcctcaccctcctctcatgagcaaacacagtgagaaaaaatatacatacattacagccagggtgatctgggttcaaattccactcagctttggtcttttttttttttttttttttttttttttttttttttttttttttttttttgctatgtaactgaccacccaaaactcagtggttataaacaactaccattgtatttgctcaggagtccataatctgggcggggctcagtggcaccgttccgttcatcttactggtggttgctcatgtggctgcattcagctggctagttggctgggatctgggctcaattgaacctctctctctcctcccctagaatctcagggtctctccctcttcctgtgtctctctacacagtctcagcatacagtctctccagcagcataaatagactttctttttttttttttttttaccaggtgacagggctttcaagattacagaagtgaaatctgccaggtctacttaatgcttaggtctggaactggaacgagatcatttctgacacagtctagtggttaaagtgaatcccagggccagccttgattcaaggagtagtgactatacgagtgtgagtataaaagacatggttcactgtgagcaaccaatgtagccaattaccactgacacgcaacaagtcacctgatctgtacactttgatgttatgtttctcatccattaaaagggaaaataataattcctattttatagagatctcacagttaaacgtgataatgaatgtgatgtggttagcacagtgactgacacccagtaaatactctgtaagtggtctctttcatatatcccaaagtatttggaatttgtaacacccagaaatttgtgagtcccttcctacaactgtctacctttcccacaagagcagagtccacagttcacgttagccatcatagaagtcaccccagtacctagtacagaacctggcattgtgtgtttgttgaacgattatgtgatcaaatgaattggtactcactgtctccaaccactcacttctacaacacatagacagattgagctatttcacaagaatttcttatccgcaaattaaaagttatcaaattcaatgtcatgagcaatcatagtagtctggagttcatcttcacctctttttaaatatagtatatgtagcaaattccccaaaaatattttgccagatttccactgcctcaattttaaaactcaggcgcactataagaaatatgtaatccatatgtctctgattcatttttacccagttcatcaaaatgctgtttttgtattaaatgtcaaaacgccttttatgtctttatttatgagccctttaaagttgttatttttaaatgatgctagaacatgttttgcgaaatttaaaatctacaaaggcatttgtaattcaattccaaacatcagcttctgggacagttaattttgtttactcctgggaaaattcctcttttcaaatatggacttttaaggttattttaagtattccacattctcatattcttcatgttaaatgtgctaatgaatggaatcagctgtatgtacacagagagtttggaaaagcaatatgtgccctgctctctctttcaaaggaacaccttgctgtctcggtcatctgattctgcctcaactctataaactggtgtggggaaaataagcctgctatgtgttacctatttttaaggctgaaacaaattgcaaatttttcttctctataattctagatagtgcaagcttctctacatagatatatacatgctcagcttattcctcacatgcaaacttcatcaaatcctcttcctgtctctagagacttcttcctgttctctactattatttaacttttcactatgagatttaaaaataaagacgataatgacctaatggaacctttccataactcaaatttcagtgataaactgattgtgctttgagttaaaattttaaaatatttataataaagcagaatgttagctaaaaataaaaaaatttataaaagtcaaggttatattgtttaaaaatccctatatttgaaatcagagaacctgaaaaccagagtaacatttctgatcgtagatatatatataataatatatatattatagatatgtgtatatatatataatcagataaactctgaactcatttattaatctaaaaaatgaggataatgatgcttatactacctgcatcacacacttatgaatatcaaatgcataatataacttttataaactacaaaaaatattaatgataatacttaatatctggtattagctgttacatatttttatgtcagtttcaaagaatgtaaacctgtataaattcacttccttatctaatgtttccatttcagagtaaaagtacttatatccagccactaaggaaactatgggaaattagcttgccataactttgaaactcacaaacgggaggcctcacgtgctcattggctctggtttcatgctctttctcctagagccaagggtttgctaattccaagtcacctgctaagcaagggatactagtctttcccttcatagagaaaatgtcatccatgtggcacggataattttatattcaatttgtcaaaatgttaatcattttaggaacagcacttccggggttgagctgagaaacatcatatttcaaaggctttggtgaggagaccaatcatacagctagaacactcaggcttgggctgaaaagcaactctgaaatttgaacaccaaccagtataaatccgttgctaggttaacaatgttttctagtaaacaaagttgcttcttcaataacgcattaaaacagaatattttctatttattcttctcttacagaattcaaggaaaaaacaaacagcctatcaccatagctaggccccctctctagaaatcagacaagaaaaacttgcattgcatatccgaattagtcttgcatggaggagaaatatcatgtttccataccactacagacctgacccgggtgttaatttgaattttaagcagaaccatgcttttgcttgggtccgtcccacctgtcagtgtatggtaggagaacaagataattacttcctcttatttcaaaatgccagacacccaagtaagagtcaatggaaaatgaacagagcacctgcattaaattttattctaataagtctaagactgagtatcactggcatcttgttatgttattcagggaaatggtggcagatgccaggcgaagcctacaaaagggtagcactacgatacaagagaacatcagaaatgcactggggaagaacttgcctgcagcaagatgaagttgtataatatatcattcattcacatggcagtgtttccttcacagaaaatacaaggttgaaatgcaaagttatttagtgaaggaaaagagcaatgctgtgctcgcactacaaaaagtgtttgtttagtctgtcaaaattctaaagattgtggacgtaaagccttctttaaaaagtcatgtccagaagctggtatggactccagtcagggaaaataatgatttaaatcattcaaatagagttgatcaagataatcaacatgagtcaaaattacaaagaagacctagaaaatagagaactctagttgtgtgtgaatgtatgggagtgtgtgtgtgtgtgtgtgtgtgtgtgtgtgtgtgtgcgcatatttttctgtagggacaattgtgtgcctgcatttgctggccatggcacagcctttcacattcattataagaattagatgagaatatttaatgacgtctttttatctttcaagttcaccataaaagaaacaagccagaatagattgttactgatgtacaaagaaagagacttatatcatcttgtggtggtttgtaggatttggaaaatacattcccgagacaaatgaaatctaaggacagtccccaaacacttacttcaacacaatgctttcacttattacactgctgccttttctagctacagaatgtcaatatgatccagcagataactgaacatctgccccaggatctgtcctggaacatgaaggaagaagttgagggaaggagctgcatgaaaaggtcactattacaggcatctcattcgctacatatgtttaacgcatcttagtgtctaaaattattagtgttgtagaggcagcattatgctgtgagcaaggcacacgactcagagttgggcagcagaactaagtttaaatcccagacccaacactacctgcttatgtgacctcaagcagttttacccaacttaaagatttccctaagttctgctgtctcatttggaaactaaacttaatgatgcaaatggtatcctgaatggtccaattactacatgactttgaatccagatattcaaagagtatatcatctaaaaaataaagttggcaagatttttttcccatttgatggtaagaaagacatcacgtagataccagacacatctttcatcaggaggtggagagtagtagaagcgtggaggagtaagacagtgtgttctctgcctcttagtcgcatggtgacttttttcaagtacttaactgaacttactctgcgctccctctgtgttccatcggtaagacgaggataacattacctacttctcaaggtttgaaatgtaagagatatactgccaagactctgtctaaaacttcccaagggctccccatctcccaaagagtaaaggacacgttcctgacaatggactgcgaactcctacgaacttgacctcttattaactctgaagcccccaaccctcctacggcactctggtgacagcctctgcacttcttcactttgcactcttccccagacacctaggtggctgctcactcacttccttcaagtctctgctccaggatcacctgctcagtggggcttttacactcatcttattttgaattgcaactctactctcctgctttctctccatggcacttaccaccttctaatacaatgaattttttaaaatatattgcatttattgtcttaactccttccactggaataaaaacttcaggagggcagcaatttgtattaattttattccctgctgcatctctaaggcagaacctggtacttgggatcactcaagaaatatttatgagatgaacacatttattgtgcattatcaaatggcatgctatctataatggacagtgcctggcacatggtaaaaccttaataatgacagctactagttctggagggtgaaggttgtaatctttgaaactgtgagtgggtgtgcactgctttgggccagtcaacagtgggataacaccgcggttaccaccaggaactaactggaaggccatgatctattgctggttctctctatgtctcaccatggaccttgggcacaccagtctctgcctctgtaaacagatacaataatatctaccctccagggcaaagagaagctaaggaaggctctgactgtcacttgatttgccatcacagatgaagcgtacacagcattttttaaaacattagataaaattaaaaataataggaaaaactgtagcttctctcacctgataatttttctggctactaaaggcaactttcagccagcactcccaggccctgcctaagagggtttcagacacaacctttttagttcgagttgcagttaagcagtaatgagggaaaaccaagactgagactttcctggggaaatctaaggatcatatttgtccatgggggcaagtcattcttttcatcagggtagaaaaatacaaagaaggatatagtgctggttgcctgttcattaactaggtagaattactgcagcaagaaggttaataattacacaagtaattaacacttccttcattttcatactctaatcctatagttgcaggatttcaactttggtccccgagtccgaaggaagatgagagcagaatggcaatgaattggattggctttggaaaaggagctgggaaacaagaagatagccctgggtttctaaccactttctaatgaaccacaactgcaacacatgaacaataccagcaagcactttagtgtttcctgtgggttttctgttgttgttaacaattgcaagtttttgtggcagcaagagccatactgttgtgcgccatacgggtatttgacaccccagtcttccctaagcctccactcctaccctttcacgcctgcacactgtatatttgttgtcactgtttattaaagataactatgccctaagtctttatttacttctgtttattgctattttaacaagagtcaccagagagcagctatgcttctggtccactcgggttctttaatcactgttagtaggtaaaatcatctgtgacaactaatccaaaaagcagattatatttattttggctacagtggcttgcaattcgttaaaatcaacaaagccttttcattagccccctgcttatgtcctaaaaacagacatttcaagggtctcaaagcgctgagctacacatatgcagccaagctaattctgacagattctcagtgccattcttaacactaaatcttattaaactaacaaacaagaaacagaacccctctgctttcatacaaaggcttaattaacatgcctaaactccaaaatcaaaatcatagctgcaaagctccctgaatatggaaacaaaacaaacacagagactgtgtcattcgttaagcaagatttaccaaaaatcgggacttttctgcattttttttttcaaaaaaataatgtgggaaaggattagaaatgagaaccatggtgcctgttactccatagttctgcatgggcattctagccttcaaaagctgggattgtgattaactggactgttggtggagtcggcagatccgagcagaggatcaagatcttattccagaggttgccagagattagaaacagtggcagcaggttttaaggacagcatcattccatcaacattccatgcatccgctttctccaaccctcactcctacaaccacactgctgcatttttcaggcatatttcttttacttgcctgaccacctggctgtccagtgtcacaatgaagggcctctttaacactgaattggattttcgggttcagtgtcagaaatgggagcgttccaggaaagatgctcacggcagtgactcagccattactgcaccaccaggcagtggccataattaatgaatgtatcaaaaggtctactcaaggagcaaagaaggtagacaatgatttatgtttacctacgaagaagattatttagctttgcaagagctttcaaaatgagggagcccagaattatttagagatggtgtgatacctttccaaacctgaagagaaattcgaggagtgagcaagtggatccagaaatgaagggcagggggagcagacagaggaagaggttttctctcccacatttccccctccacagctctgattggaaagctgctatgatttgtatatttccatgactgctactgcaatggaattacttgtttgtccctccagcataatcctgaacattgtcaaggatgattaccagatgatacttcacgcaagtctctatcctaacatgcagatttccactggttgaaaggggaggccaaaagcagccctcgagagcaatggctcacttggttcttaaatgcacatgtgacaagcacatcaggctgcctccgagaccaaagggtccaattcgcctccacaagggccagtgtccagcagccccttcagccagggctttggcttcttctggttcattccataagcaaaagagctgtctgttagagcagataataaaatccagcctagaaggaaaatccacatgcaaagcctctctcaaatcagagttttgtccacagggaaaagtgagccacatctgatataaaagttatcattttgcctctccataattaaaactattgttgccatggcaatccaaagagtgttgcaaatacaggaaaggctcatgtcatggctttttgttgttattgatagagtttgcagctccagccacggtgtatttatgacagggtggaaatgtgacttgggcaaacaggaagccgtagcgggtgaggtgagaaactctaaaacttcattatgtacccaagatactcttttcaattgttcctcagcccctagcctgacttactccatagataataaaagtatatggtctttctgatgcatatttacatctagtagctctccccagcataccccaaagcttcctggttttcttctgtatcatctgctactatttacccaagaagatttccaggtccttgaaacaggtcccttttctgagccaccttatcaagcaataggaaccacaggcagttctcccgcagggagacaaaggtttggggacttaaacaggatggctcaacaggctgcatgactgttgttataaaaacatgttggccaagtgtggtggctcatgcctgtaatctcagcactttgggaggccgaggcgggcagatcatgaggccaggagttcaagaccagcctggccaacatggtgaaaccccgtctctactaaaaacacaaaaattagctgggcatgatggtgtgcacctgcagtcccagctacttgggaggctgaggaaggaaaattgcctgaacccgggaggcggaggttgcagtgagctgagatcacgccaccacactccagcctgggggacagagcgagactccgtctcaaaaacaacaacaacaataacaatgacaaacatgttgagacaagcgagacagcagcggttcccggaaggagtatttcaattttatatcttctaaggttattctcaaatacaagagaagaacatgcccctgaggtttttctgtttttggggggacagggattgggtttttgtttttttggggtgggggcggaatgctccttcttttcctggtttattcaaagtgggtctgctcggctgggtgtggtggctcactcctgtaattccagcactttgggaggccgaggaggaaggatcgcctgaggtcaggagtttgagaccagcctgtccaacatggcaaaaccctgtctctcctaaaaatacaaaaattagcaggcgtggtggtgtactcctgtaatcccagctacttgggaggctgaggcaggagaatcacttgaacccggggggtggaggttgcagtgagccaacatcgcaccatggcactccagcctgggcaacagagctagactctgtctccagaaaaaaccaaagtgggtctgctcttcacagttcatgatcacctcaggagaaaacaatctgagcgagcatgagaaaaaggccacacaaacaactccacagccctcagacagccctgaaatctggtacagatctgcaagcaaaacgctgggatggatggaccagtgttttccagacttgccagacccaaaggagcacctcgggcacttattagaacacagatgccaggcccctgccctcgagctgctgcttccgcagatctgcacacacctgggaaacaccagatcagatgaatttggccaggtgctctaagggacacaccacactctcataactgagtaaaaaattaaatccagagccaaagaaactgaggagacagaggacttgttccctggcctgttctgtgggaacaggtacttcagctcaaccactttccatcccaggaaaactgataacacctatgaaaaaaaaaaaaaaaaaatcactcctgtttcgttcctgtgactcttacacatgaaatgtgaatccatggagtccaaagaccaaatggtttggcaatatttatttggcagaggagcgaaggggaaaaagttacatttaattttaaaattttatttttcaatgaaaaataataggagagaaactagccatttaaaactctggaaaatcaactagctactttttttgtggtctgagagggacattgcacttgcagccatagagatacaaaaaaaagtataatgtttcacttaatgctgaggacagtagctcaagatgttgaaagaagcatataatatttcccctgggggatctgaaggtagcagtgtaggtgacaaaaaagcctggaagattgaggtagagaaggaagctttcatccggtcaaatgagtagccagagcgccgggtggaatgctgaatgctgaatgctgaatgctgaatgcagcatgctgtcactaagcgagctctccctgcacgaagaatagcccaacagagctccaattactatatttcatggacactctgtctcactggaatacagcttgttgggggattagtgtctagagagaaattctcaaataaacttttattaaaagactagatgcttagaaatggcaactgcttctttttaattctgaaagcaatccgaaccataactcaagagttctgccgtctgataactgagtaaaatccaatgctgttcctgaaattttatagacactcctctctttctaagtacatgaatagtgtatatacactcttcaaaggctcgatttttctcttttgtagcaaaatggcaagagcctatgggaatgcggtgcctggggcaatgttcctttttgcttagaagggacctgcctgctaatcacctgcaagtaataatagactacaagggagggagcctgaagacggcccctcaccaccctgaagggcaagggttaagtagaaacaaagggagggaggcgttcttggcctgagggagctctgcaaagtgaccagtgagaatatccccaaggatggatccaaggggctgaggagcagcagttaaagatcagaggcaacttgaaatgggccaacgtgctgagcttctgaactagaaagaaaaaggataatacttccaaaaggctaacacaatcttagggccagccatatcttggaaagtgacttgctctgcctttaggctgagaggttgagcttgatggctaaggcacgccataggcccctctctgcaggctgagaaatttccttcaggaatatggcattcttttactccaaggcaggactggtgccatactggatgctggcaccgcgggacggggctcccagatcatgaaggagagcactagctttgcatgggatatgacgaaatctggctattcttactggtgtactttaacccaagagaacttagagcagacaattcaaagggcattaaaggcttagaaaactgtagctaagaagttgttaagggaaaagagtttaatccagttccaatctttaacttcgaaagaattcaggcacatgagggattttcatggggtgagttttagtaattcttttccagttactgaaaagacaaagagaagaaaagggctcaaaatagtctagttaaaaagaagaaagtcttgaccatgagggattggaacctaatggtgaccgtggaatctcttccttcatattgttgttaattatagaatagatatgcatcaatcttgtgctgagggctctccctgcatgaaatttgtagaatggctttgaattgattgactcttccttcaccattgaatttttcccctgtaaaatatctgtgggcaaactcccttttagcctccactttttctcacctcttttccccagtgtctcctctcagaggatgtctcagttttttctgccccttctagccatcccactcctccatttcaataacaagggaaggttaaaaagaggagcatctctcaaccccacttctcaatatttactatcattaagaaactcacagcatccatcttcattgccttcttcacgtcaagactgccatgacccattgggaacatctcctcttcttcctgtcacagcctccatgttcgtggacattttttatgagtttcctaagcacattgatgattcttccatctatcctttccttccctgattaaatcctccagctgcatgccactgaccatcacccaggttactagattacatggaggattatgtattttaggatttaaaacaatggtctcctatggaaacaatccaaatattaatcaacaaacaaatggaaaaacaaaatgtggtcgctacatacagtgaatattattaagccttggaaaagattaggattctgatacatgctacagccaggatgaaccttgaagacactactctgagtgaaataagccagatacaaaaggacaaacattgtatgattttacgtatttgaggcacccagagtagtcaaattcatagagacagaaagaatgggggatgctagggataggaggagagcggaaatgggaattattgttgaataggtacagagtttcaatttgagatgatgaaaaatatctagagatggatgatgaacaagaatgggaatgcacttaatgccactgaactgtatgtacacttagaaatggctaaagtagttaattttctcaccacagttaaaaaaaaatactggaaaaaaaaccacactggtctcccaagtttgaatgtgaatgttcaagtcacacctgattgtttcagaagacacttgtcaggctctgttaacaattggtggtaaaagttggtcactcaaatttcttccttccttgcttccttccttccttccttccttccctctttcccttaagaaatatttattgtgcaactactctgtgacaagtacaatactaaaagatgtgactcaatagaattcacaacccagaagagaaaaggggccatcaaaaaggcaatacatctcccatcaaattttaaacataggaaatgaatgcttggaaacatataatgaagacttcacccagtgcgtgtgtggaggggagctgggagagggagtgcttgaagaaatgtttttaagctgagacctggaatttgaataagagttgggcaaaaaaacaaggagtatgtagaagaacattccagacagagagaatggcatttgaaatgaaaaagaatgcaaggcttagtgcatcacaggtggtttggctttgcaggagtttaggaaagcagagaagtacgtgatgaggcctgaaaggtgggcagagtgcagaccacagggggcctaggagatggcattaagacttttagactttttgtcctaaatgccaaatgagaatattggaccagaccccccaggtctcttcctcctttatgatgctattcaactataaaatgctacatctgtgatccctttccaagcacaactgccatgccagtcctgccatcaacctccccatgttctcatagaaaccgtacctgatttccagccctcaggaaaccccctaacacccatactgtatcactcttaccttatctaagttattagtcaccacctgatttcattggacatccttcctctctgagtccaggagagacccctcaccactgtcctcacctcatggacattctgccaagtttaatatgtcatcttcctttctgactcacatcccctttgaagaacctttctctgactcacttctcccttttctcacacatccttatttttctcttgcatctttaatctcccttctaacctccttccttctgcttcagatattctgggtctcttctatatccatattgctttttggttctcaagtgcaaaggaagatgtgaacatggctcattaccaattcattctatttaacttcaactttgccctcccccatgaataccaggtgatccatttattcatcccctgagcattccccagctcacttccttctgaggtttatttagaattactctctcctcaagcttcaaccccccattttcagactgactttacattctatttattctgtgggcgtcctctctgcccttgcctctgctgcccatgggtctgtttctagagataagtttagtcttctagtctttgtcagggtggatgagacttcactgtgttaaagacctggaaactgcaaagacgtataagacatagttcttgtccttccagaaatttcaatctagttaagaacctgtagaaatacagtactataatacattgttgtttcagcatgagtcttaaatagtactgacagacacttcaacatccagatttcttctagctcaaggagtcaggaaaggctgcaggaaggaggtgacatttaagctgagccttgaaagataaatgggactccagttagcttgtcaaagagtaatggagaaggccccaaaaagaaggaactgcaaatgggaagcattgcctgtagaacacacaaggttccacaatgattacgatttttaaagtgaagaagagcaactagaagtgggtgatgggataatgctgtggagagcttaactgcccaatgaggacagatctcaccagagataatgggaactcatgtgatttttgtaaggaaagctggcatgttaagcgatattattctagtgtggctgatgtgggacttggaagttgagaggctaatggccaagttcagtgaaggggcacctgtcactgtctggtcccaaagcatctaggagaaggtacatggatattaaagatgacatgcacgtttctcctaattctcatatgaggatccttgtcccttgtccatccctaatcattttgggggaaggtattccttacccttattgacttattatttcattttttctaacctcaccttcagaactttctttgtcttcagcttaaaatacctttctctggcctaccctttgtgtaaaataagagaaattcaggaaaataattctcccttcctatgaaaaatgttttcccttgacccacactgagaaactgctccttccttattctggaaaatggactctgtcttcccaaagttttccagctccctgacttgctctttccttcccctggaaatcttcccacccctgctgcctcagccttagaggttcagctgggatgttgctctcaggaggaccagctgcaccccgcctcccaactggcccaattggcccaggtgccctcctcagggttctcctgggactctgaacacccttggttactgcactgatcacacaaagcagaaatccctgtgctctgcagtcatctctccaacttgtctatgagctgtgggaagcagggatcatgttgaaaagacatacaaaatatttagaataaaaagattatttttctttctttcagaggagaagccaatctaatcaagacagaaaaatgagaaaccacaaaaaaaaaaaaaaacacaaaataaatacatttgacttcttttctatcatgaaagataattcaaaccaaaattaaaaggtgaaaataaggccaggtgcggtggctcacgcctgtaatcccagcactttgggaggccgaggcaggcagatcatgaggtcaggagttcaagaccagcctggccaacatggtgaaacgtggtctctactaaaaatataaaaatcagccggacatggtggcgtgcacctgtaatccgagttactcaggaggctgaggcaggaaaattgcttgaatccaggaggcagaagttgcagtgagctgagattgtaccactgcattccagcttgggagacagagtgaaactccatctttgggggtgaaaaaaaggtaaaaataaaataaggaatcatttttagaacacatttaagaaaaagaggttaatattgttagtacacaagaagtttcaacaaagaaggaaaatgacaagatttcaatagaaaaaaaaattggcaaggcagtaaatccatgtaaagaagttacaaatgaccaataaaattgtaaaagatcttcagcttcattaataattttaaaattgcaaattgaagtaagatactacttcccgataataaattgacaaaaagtaaggtctgttagaaccatgggtaactaggatttgcgtcctcgcacaattttggtaggggtgtgtgtgtgtgtttgtgtgtatgtgtttagagacagggtctctcttgctctgtccctgaggctgaggtgcagtggtgtgatcatggctcaccacagcctcaaattcctgaattcctgagctcaggtgatcctcccacttcagtctcctgagtagctagggatacaggtacatgccaccaaacttgtttttttttttttttttttttttttttggtagagaaaaggatcttgctacattatgcagccaggtatcaaactcctggcctcaagcaatcctcccactttggcctcccaaagtgctagaattacaggaatgagccaccatgtccagccaatttatataatttttttagatccacagacaatttcttataaaattgaaaatatagatacactttggcttagcaatcctactctagataactatcctacaggagtaagaccacaagaattaaaacatttcctgctttcaaatcacagctcttctacttggccaaagcttttatcttctctgtaactcaatttctccatctttgaaataggataacagcaactacctcataggactgtttccaggattaaatgatttattatatttaaagcacttaaaaagtgtgcaacatatagaaaatattatagtcattgttattcccattttccaaattttctatattgacaatatatgctaattataataaaaaagtatttaaaggaagacaacggctcccaattatttctaaatggactataaaccattggcctaatttaatgagatggagccacttttctaatgtagccctgccttctcaaagtttttcacttaggctttctaattttctagccccacctctattcccaccccatgctcatctggtaaattttaagaactggctctcaaatgaaaaaaaaaaaaattcgtttgaaaatttggggcactgtcaatttctgtggtgtaaatactccctccatggctgatttgagctaccaacatgacatggtgaacatggagctgatgaggagatgcagagaagtgcagtattccagactttccgtacctcaagaacatggataagaccaaaatgtggtgaagaagaataattggaaagtgattaatttgcagtatttattacttttggttttaacatactgacttattatatgttcatatcattcaatttttaagaaaattaaattataactggatcacaaaattcctagaaatttaacaagtgattctcttagtaagaacaggctctggtgcatcactgaactctctgcttcaagagctctgcacttgtattcctcaattgcattctcccttggactatagctttgcctccctcctggtctgctcccccatcttccctccactgacccctggcctatcaaccctgcaatgtcttcttgcaggatgtcagcaccccactggcccgttccttgcccgattctgttagcaattttgaagaatactatacatttagcagctcagtatgcgtattttattaaccttattattgactattttgtgtatcatcctttctcccaactctttctcccaaagttagatgatatttgtgtattagtctgttctcacgctgctgataaagacataccagaggctgggggtggtggctcacgcctgtaattccagcactttaggaggctgaggtgggtggatcacttgaggtcaggagttcaagaccagtctggccaacatggcgaaaccccgtctctactaaatatacaaaaattagccggacgtggtggcagggacctataataccacctacttgggaggctgaggcaggagacttgcttgaacttgggaggcggaagtttcagtgagccaagatcactccactcctctccagcttaggagacagaatgagactccatctcaaaaataaaaagaaatacccgagactgggtaatttctgaagaaaaggtttaatggactcacagttccatatggctggggtggcctcacaatcacggtggaaggcaaaaagcatgtcttacatggcggcagaaaagcgagaatgagagctaagagaaaggccatcagatcttgtgagacttacaaagccacaagatctcatgagacatattaaccatcacaagaatagtatgagggaaaccacctccatgattcagttatctcccacatggtccctcccacaacacatgggaattatgggagctacaattcaagatgagatttggatgggatcacagccaaaccatatccattgttttttaaaaagtggttatccactgagagaaagggttgggagagtgcgtattggtgactcttttgatagttcacctccaatgtccacttcacttaggttagagaaccactattttatacattataaatcttagcacaatgaatggccggtatgtagtaagcactcagtaattacttgtaaactgaaaatttaagatattttaatagaaaaactaaaactctaataactagtagttagctgaaaatgtagattcctggtcaatgtaggtgtaataacataggaaaaattaaactgcttttcctactctcacattcaacacagacacttctgtgttcagacgtgtgggcttgcttttgctttcccacatgtcagttctccagtggtcaccaactgggtgtcctacgatttaactcaattctgacactccctacctggaaacagcatcagatcccacaggttaggggctcagtcccacaagacttccctccacttcagacatcaactgaaagttgtaggctacctacaactgctgtttgatttagctataaattcgaggtttccttaacccccttctctggtttgattgatttgctagagcagctcataaaactcagagaaacacttgcttgtactggtttattatatttataagggatattataaagaatacagatgaacagccagccagataaagaggtgcatagggcaaggtatatgggaaggggcacggggtttccaagccctttccaggtatgtcaccttcccagaagctccccatgttcagcaatccagaagctctctgaaattgcaaattgaaatcccacagtttaggaatttttttttttttggagatggagtcttattctgtcatccagcctggagtacagtggagtgatcttgggtcactgcaacctctgcctcccaagttcaagcagttctcctgcctcagcctcccgagtagctgggattacaggcacctgccaccatgcctggctaatttttatatttttagtagagatggggtttcaccatgttggccaggctggtcttgaactcctgacctcgtgacctgcctgcctcggcctcccaaagtgctgggattacaggtgtgagccatcgtgtctggcccagattagggatttttatagcagcttcatcctgtaggcatggtcgattattaactcaatcttcagcttctctccccttcctggaggatgaggggtatggttgaaagttccaagcttgtaatcatggcttgttttttctggtgaccagaacccatttgggagccctccaaaagtcacctcaatagaatgaaagacactcctgtcaaacaggaaattccaagggataaagagctctgtagtcaggaatgtgaaggttgggggtgttgtgggggcaacaaagaacaaatatatatttctttttataaatcacaacctcatagtagatgtttggcttcttgtaccatgtgtccaagaaacaacaatatggttgtcgtacttgtactgaggtataatcatgagaaaacaagttagcatgtcagtatcattcttataaaagaaatgaaatgtcttttatgaaggatctaattcacaagcatattaccattaacagaatacagtggttgatgactattaatgtgaaaatgaccaccatttggatgttcctgctgtcaccttcttagagactttggggatgggtaaacgcacacacacacaaacacacacacacacacgagtataaatataaatatatatagccagaccatatacttactttatgtaaaacaattttaaactccaagcatgatagctatgaacaaacttcattaaaaatagtatttagagatcaaattgttttacttctacttactttgaaataacatcataattaacttttctctcacggaccttgaggaaaaaaaaaaagaagaaggagaagaagacaaacagcaagagacagctaatggccttcatatccccatgtaaattttggcttatattaaaacactcaaggacaagcatcagcagtaaatcatataacctacatttcagaatcaaaattgccaccttgcaccctttctgaaatcaaaggagaaatttcagattgttatttgctcaaatctatttgcattccctgggcacatacccaggggcagaacttaaccgagaggcattctcaagccatcctgaaacatcccccctgcagactggccacacttgcaaactcaagaactgtaggagtgggtttttcccttgtaattggtacttatctttgcccccaagaaagaaagatatttttcaagtactctgtatagtaacaaaaaaagaaaaaaaaaactcaaattttttgttccacttagccagccataagctttctgctaattctcagtcataaataaatagaattgacaaagacattaaagatggaaacaataaaaatagtcaggaagagcagaaaaaaaaaagattgccgtgatattctgtctcgttttgccaaaaaggtattaaagtaccaatgatataaaaataggcttgaacaattttttctaaaggaagggggtagctactcccagactacataagatgggtgtcctaaaggtttcattgattagttgataagtttgcaggtgggtcattagtcaattagtcagaaaggtttgaattagttactagagctctgcctcctgtgaataaatgcggggagtattctctctcccaccctctgtgacagatgatatctgttttctcctgtgagtttgaatttaagaaccactgaagctcagcaacagtatattctggctcaaatgagctgaaaattgcattcaatttgaatttcaaaaatggaggggaggaaggggggaagaaaacctcagcacccatcaagtctctacactcttcaactacttcctgctgcttagctgcattctgccaggctggggacctgaaacccaggatgttgcaggggaaagagcatcgctggattcctgcccagtctgagtttaaaaataaactttttatagtcaggatcaaagcaaacctcacttttacacacatgcataatgcagaatgtgacccaccaaagaaatagatttaccttttccaaactgaaattggcctgctttattatttttttttttctttacgtactctggaggtgataaaggtgaaggtgtttttcttgggaaactctggaaaagcaaattcttttctaaattaaaattaattcctcttcagctcacttaagaccctcattccttgtggctcggtgcccctgccttcacctgcctcacattacaaagcagacgtgttcttgaaaagttgagcatgtagctattgatttttcaaatcaaatcatattttaaatgctctgagagagttggttatttaaaggaatcttgtgataaattattttttaaagtcaatctatttctagtgtacaaatcattgccccttcctgcaatggcatagtaagcatgaatttgaagcatatccaagttttctgaaagcagggcacacctgtagtccgtgagaagtagatgtaggtatcactaatatttaaaactaaaccgatgctacgcaaaacaacagatgatatcccagaatcatgtaactgaatgatttggggccagaactccattttatgatagttcaagctgaaggagaagagagaacgccaaattcattccaatggacttcaaacatgaaaacatattctcccgctgactacattactctcaatttgcaaattaagcaacctgggtgccatgaaaaaggtaattcaacttctaaagtgccattttccacactgaagcaggagtctgctgaatgctgttcaaaaatatgccttactccaaagggttcactagcaagtaccattgaaaggcatcattggcagtgagtgcacagggattcctgtgcacctactctgcactggcctctgcagcaggaactcagagtaactaatacatcagagatcctgcattagaggaggcagtggctcttcatccttcctgagttacaaacccatgtgagggtatgatgaatgcacagacactctccaacaaaagaatctttacatgctatgatcctcgtatgatagtcattacaactacaacagaattcatggatgcaagtgaaggacctgggtctaggatattaattgactaatggatggtatcctgggaatgttagtattacataatttcccttcaaaaatggagtgaagtagacagatatctctagaaagaaatgggtattcaattggaatctaatggataccatgaacttttagcaagctcacagaaggtagaattagaaagagaaggatccctatcttaaacgcaggacaagacgtaaagaagagtaatattttacttcttaggcaccatcgaaagacaagaattaagaaatagtctgactttcacaacctcagcttactggtcagtatagtgaatcaatagaaacaagggcaaaacctttccaaagcacctacatgatcactacaacacatacttggtaaagtccaatcttccagaatatcctacacatagacaaaaaaaaaaaaaaaaaaaaaaaaaaacactttaaaggcatttaaaatgatgtttttacattttaaaaggcagaatgcggaaaacattataccttactatgaaatactagccaacaccacaatagtagtcaaagatgtcaagaggacacttaaccctctaatgtgtatcacgtggcattatgttatgtagattttaaaagaatgttaatatctcctaatcttgtagggagcagcttacctttcaaactgcgacagtgttagcgtaggattttttccttacatcttcataatttaatattgtttcattgatgaaccagtaaattgtcagctctattcatttatgtgacgtgagcaaggatccaacccaaaaaaggaaaaaaaaaaaaaaaagtaaggtcaattttctcggccgctgcatttaataaaatctcccaggcaatagagttaagcacacattaatagctatgacttagtatgctctgcctttagcaagtctttgattttcctacacatacactcagggctgtattaacactccaacgaaggtacagtcctcatttcttattttaagatttcttccttctcagctttatcagatttattaatcttctgctcctctcttatttatagcaaatgctctggttagggtttcaaagcattttccattataatacccatatataactttcagaaaaaaaaaaaattcttccaagaccaagggactttttacttacttcacattagtctcaaaatgtatgcatttctccaaacgtgaaggctttgtgtcctatttctctgatcttcagaaaaaaacacaagagagcgagtagagaggctcaagctttctaagtggaaaaacttgaagcttctattttaaataaactccaagtgggttttcactaaacatacactaatgatgttttagggagatgtctgtcaaaggaagctactgggttgaacctcatgaagttgctgttattctatcaatttcaacctacaaaaatggcaattccatatgatttaacttaatgcttctcatatctttactaaaatataaaaagactgttcagagcaacaaagcaatcccttggatatccggggaaattctgtgccgaacttgcagctcagggggtgagaagggagaagagaaggttgtgaccaacaggaggctggaatgcccctgacagtttgtttggtgcatgccctggtgcaatttattaagtaaaagatgtggagaaaataattactcgggtggcaccaggccactttgcatcacatcccttgaggcatgaatgtggtaactgtagactttggggagtgaacacctcaaagagatgcctgtattgcattagaagaccctcagagggacctctaaatctattcactaaagacacccttcagactgatagctttcccgctttctttcaagaatgaggttaaaagtaaaatgcttgacaaataaactagattgaggtttcaatcccaaattccccctacacccagcaattggaatcatatcttggtaatttactgtaatgctaaacagaagctatttgaatactagaaaacaaagggatcattttaaaataatttcttgcataaagtgagctgaagatcaactaagacaagagaacgaggaggtttctagtgtaggctggaatttgacagggtctagaatcaagaaaggactgtgctttacacataaaactaggatggtgtttcaaacacactcatgagagagacaggaggtaagatgactcaaatgtgagaatccaaccctatttattttctaggattgtgaagataagagcctgttaaaaagctgtaatttatataagtataaagaaacactaggagaggacccacttaactgacactagagggtcagaagcccaagaagacctaatttaggttgttgcttttttaaaaagaaagcacaggactcaggaggtacaaaaacaggatttgaatcaagaaaaatccttcaggtgctgatttcaacagttatatggctgctttctgtgtaatattgctaatgctcatagccagtgtggccgtagatttcaagttaacatttaaactctacaacttgtcatactcccatttctgaaatggctgaaaatttgaaataacgttaatgttaaaacaatggttttgggaaccagttctccttttgatcccacaccaacaactatctcaaagcagaggcattcacctcaggagattcggtttgtgggcgaggggagacggtggggcattggaagggtgtgtggaatcagttcctgttacccctatgatttcctcttattacaaaatgcagtatacatttccccagataaatctcgttttaagtggtgacaactaatccagatgaaagatttcttattcaatactataggtaatttactaagaatggggggaaaaagattgtaaacagcctttagaagttcagtaacaatatgattgagaagaattttgtgggtaacccaggaaatgcactactatttatctcattttttcccttgtctgcaaatattctaaattccaaacaaccagttttattttgttttattttattttcaattttagattcagggggtgcatgtgtaggtttgctacaagagtatattctgcgatgctgagatttgggcttctactgatcctgtcacccaaacagtgaacatagtaccggacagaaagtttttcaacccttgatcccctccctccctcccctcttttggagtccccagtgtctattgttctcatctttgtctgtttctatccaatgtttagctctcaattgtaagtaagaacatgtaatatttggttttctgtttctgtgttaattcacttaggatagtggcctccagctgcatccacgttgctgcaaaggacatgatttcattcttttttatggctgcatggtattccatattctataggtaccacatttccttatccagtcttcaacttatggacacctgggttgattccatgtctttgctattgtgaatagtgctgtggtatacatatgagggcaggtgtctttttggcagaataatttcttttcctttgagtatatatccagtaatgggattgctaggttgaatggtagttctgtttttagttatttgagaaacctccaaactgctttccacagaggctgaactaatttacagtcccacaaatagttataaatgtttccttttctccacaaccccacaaacatctgttattttttcatttttaataatagccactcttactggtgtaggatggtatctcactgaggttttgacttgtatttccctgataattagtgatgttgagcattttttcatatgtttgttggtcacttgtgtgtcttcttttgagatatgtctgtttatgttcttagcccaatttttaatggggccatttgtttttttcttgttcagttgttcaagttccttgtagtttctggacattagtcctttgtagtatgcatagtttacaaatattttctcccattctgtaggttgtctctcttttgatagttcttttgctgtggagaagctctttagtttaattaggtctcagttatcaatttttgtttttgaataaccagttttaaaatgtagactgacacacaactcacaactgttttgtaagctgatgattgcctatcctatgcccaactaattattaagattgggcatataaacttattacaaaaaaaaatacaggattaagaaccatcaagtgcagttgcctggattttgcattgcaagattcccagggtgtacttttcacatgcattacaacgtgaatgatctgccctaccatggttgtgtagtatgagagaggaagagaaagcctctggattctctttcctatcccagagaatatttttaaaacaaatatagataactaaattaccagtatcccttcactcacaaagtcagtgaccccaaggcaagaggacttacaccatccctaccatcaccctctaccatcaccagcagctgcctctgcattgttgcaggaaccttcttagaaggggaattgcctctctaaatacagagcaagaaagatctgttcttcaggtctcaaacaggttctaagaatagatattccaataaaaggagaagccacttggcacataatattcctgaaacatggtagcatgacagtggaactcaaccattcacccagctgtccttggggaaaaacacattttgaattccaaaaccttaggagtatatcttactgtgagggtttacctgtaatctacttactacacacacatacaaaagcctgaacagcatatactctcaaaaagtgaatggatagcagaagtaaagatttttaaaaggggaaacacacatatttcctttagtcattctgaagataaccctagcgtacagccaggaaaagataaacagaagaaattcctcagctttctagatcccctaccatacgttattcatgggggtttgattatttgaagattttttttcaggatttcaataaaggcaatcaggcaggattatcttgggcaggcacaggatatacaagcaagctactggatgctggggagatgtagggcaaagacaacttcagctcccccctgccaggaaacttgctctattaagagataaaatgtcatgatataatctatgtgatgcatcttttgaaaagaaaagtgcctcaaagattatgaaatagttttgagagtggaaaataatccatcaatttagatacagctttttcagtgatgggtacaatgtaaggctccctccagttaaactgaggtcaagcatataattccagatttagatctcccgatatttgccactctatatttagtcttcacaaattcaataatattggctactttctgatgcaaactctgacggaggaagcttttctgtgaggacaaaatatttttaaaataagagatttcttcattaagttggccaagatccttgagtctagcactttgccaatcattttccttccactttaacgctggaaacatggaaagttagaaaggaaaaggaagggaaataaataagagaagaagacataaatgaaaaattaagagaaaagaaatatgatggaaagaaacaggaaggttaataaagaaggagcacatgatctccattcattcaaagtcagaatactattaatgcacccaaaatcaaatgcagtgcaagttcttcttggtttatcatccctttccctggagaatgaaagaaggctatgttgatgaagatcttggtggtaatgcactccaaagccttcattttaccagtaaggaaagggaagtcctgtaaggcaaagtgacttacaaagtcatgactagaagccagaatcacaatagaccagtctaatgttctaccaaccatatctgcctgaaagtggtaatggcttttccaagtcttagacaattgctaatgacaccaagagtgaggtaaaatggagatgcttttctctctctgggggaataacagagatcaactcacagtattagaacctacaggaacggctgggcaaggctgcagctgacccagcttccagggtaatttgacagttggagaataacacactgcaaatttagagggacaagctctaagcccaggtttttcataattccaacaaaccgtctccagtggttattatgacataacacttctgatgattaattaaaagctcttcattagatcagtcagcttataattaatagctccccctatctttaataaatagaatgatgtgaaataaatgagagcgataccaaggattagctaaagcctaaacccaaatgaaagcaccctctgctctcaaccaaggaggcaaagaaacaaaaggggagggaaaagtgggttttgttaaacaaagatgagaagagagagtgctgaggaggggaatgtgggaaggaaggaggcatttgctcaatcagtacctattttcagaatttccttcaagctggcttgaactgagagccatcaattatttaaaagatgtaacatgatgcttcctttgttgaggcaaatctgcaagcagaccccgagagaaaataaaaaatgaattaggcagaatttattagtgtgcttgaagaaaacaaagatttagctattggaactgactcttttagaaatggttcaattttgtctcctaaaatccacaaatctttcttcccctctctatacctatttatttattattttctacagtagatcacacaaaaagaggaatgaatcattttgcaaacttctcctttcttttcagattcagcttgatgtactgtcttcatttaaattacaaatacgctaatctgaaacactgtttaccaagtagcattttaaatgaaaaatacaagaaattgcatcattcacatttaaaaaatgactttagactctgcacctcataaaaaagagccgacagtgttctctgccttggctgctgtatttcagtccagtgaatgaaattcaattagtgggctttgtacttaggacattatgattctgatggttggtctgatcaaaactggtgtgccaagcctcagttctgtttttttggcagaccacagttaaggaaaaattcaatagagatggttggcaggagaaaagttagtttcagaggagcttacttttcaccatcataaggaaatatgggaggaggagagctgctccctggaacagctcattatttactaaatgaatgaattaactttttgagaaacctcagtacctaagtctgtcattaccagttttagtactttccaaaaatagcaattgacgtaaaataaaccagtactaactagaaccaagaaatcagagatctaattcatctttaggttttgatcagcctcagcttgtgttccaaatgaattgtagagagaccacagtcttcatgatgctatcagaaccctcccaagtaaaaccaagcaacaggcacctcataggaaattccaagcctttacagtgaagactcagagtaatcatcggttcgagaggtgctatttatctttaacacttctgaaaacaaacccacacacaacaaaataaactgggctgcagcataggccctcgcatgtcttgaccagctatctggaccactacaccatgattcaggaacaccacacccacatctgcatggatcaaacagaatggaaagagcaaatcaaactgatcattacatgggtctgattctttggccagcaaaagctgacaagtaatagtgaaaatttccaaaggatatacagccattggtctactaataatgtcgattaattagccaattaagatctgagcatccatttaaattttaacgttgtgttctcaaaacacagaccaccctccccccatatctttcctttcttccttttttctttctttctttgtttttttagggagtctccctctgtcaccacggctggagtgcagtggtatgatctcagatcactggtttcaagtgattctcctgcctcagcctcctgagtagcgagattataggcacctaccaccatgcccagctaatttttgtatttttagtagcaacagggtttcaccatgttggccaggctggtctcgaactcctgacctcaagtgatctgcccgcctcggcctccctaagtgccattacaggtgtgagccaccacacccagcctgatttctttgcttctctcacagggagtgacaccaacatccaacttcttttataatcagaaacagagaaattatccttagcatctattttttttaatcaccattatccacttcatctccaagtctttccctcttcttggaaaatgattacaggaacaatcacatgaaattccaagagaaaaatataaatatacatatcccagaagtggcatctgtcttctcggtacactctttggaaagtggttctaggcgctttacattttgcctgagcatgacccaggattcaggccagatgggtacccttgactcactgtgcccttggtgctatttttctctgactcaaaattgtatgcccacatctgtggttgatacgaatatatcatgttgatggtttttcagatgataaagagattcattctaaagtaaatctttccttgtgtcaaataccaaagtcaaaatgcatgcttacttccttcccataaacgggcttcctcagatgtatttttttcagaattagttagtaaaatgacaagctacaatggcttatttctagctttctagggctggggctgtacgtgagtatttacaccaaggaaactggcaaacaatacaaatcaggtgaggtggttttattccccctggaagagccagtttaccagcacatcactgaaaagcgtttttctttcattgtttccttcttagcaaataaaaagatccatagtgtccttcattaacacccatctttttctcctcctttcctttagccatggaaactaaccagcagttcctcttgctccttgacacacagctaaccatattccagccactcttaagcttatataaggtcatgagatgagttttcctccatggaaagagagcagaagtgacaggagcctccccatacttggtccataaaaccctcccccaaacaatatcccatatggtctccttttttgcagatgatagatacaggaaactgtggatgctgtgtattgaggtcagaaagccacaagatagaaggagcttggccttgaaatcatcacttgaaagagactcaccccaatcaggaatacccattagaaactttatgtgaaggaaaaattaacttttattatgtttgaacatcaaatatttgggagtttgtttgatactccaaccaccactgctgtaactaaacactctctttcccctcttctttcaacaattcctcccaccagctactatgataaatctggagatgaggaatggtcaagattaggaagaaagaaataggggacctggccaggcatggtggctcatgcctggaatctcagcactttgcgaggcagaggcgggtggatcactggtggtgcacgcctgtaatcccagctgctcaggaggtgtaggcaggagaatctcttgaacctgggaggcagagattgcagtgagccgagatggcactactgcactccagcctgggcaaaagagcaagactccatctcaaaaaaaaaaaaaaaaaaagaaagaaagaaacaggggacctaatattagctaatattaggtaatagtcattagctaatgactattagctaatatttccagattatctactatatatagtattatgtaccccctctccccccataaactggtataaggaatctatttgggggtatttgggattgttgtgttctcaaaaatttaacaatcatagctctgaggcttaatcacttgtatgtgttacaaaaccagatggttcaagtgggtgtttgtttacaagctctttgcataaggtttttagctgttttttagaccaaagctgaatatttccactaagaaataaggcactgaggaattaatgaaaaaccactggatttcataagtccctggatttcctgccttcactctgacaccatttggtgcactttttcaaggatctacttagggcccccaaaacaagaacataagcttagagcactttgagttctagtttatgggacctcagcatactttgggagaaggaggcctctcccctgggctcagcattgttctggatgctgtcagtgaatcaactaggaaagaagagagcgctctgccttcccaacaccttcaccatgctgaagctctagaatttattatgtttcctgttttaactggcttctcccactgggttgttttgaccagccacatccatctccagctccctccttctggatttagatgaaaggagagagaaaactttcctggtgattccctcattctttgtttcctctacattaaccacatggccactatctgcaaacatgcaaaggcacaggtttatttactgcaaaataagtgaaataatgttgaaggtttcttaagggagaataaaaggtttcatcaagtcacaaacttttatggctttgaaaagataagcatgtgtttctggttttctggatgagatcattacccctctcctggcacactatccactttgtacttaaccttctttcaacagaaagaaaggcagtcaatgcttgcttctcttcatttttaacaagattaataatgtacatcatagttagcacccatgatattaacgtctgagatcataagtgttacctaaactggtctctttcctgtcaccacctaatcactttcaaaaaaattacaatatttgaggtgaaaaaggcaaggaaagtacatgaatatcttgacatttctgtgagcttgtctctgtcatcttctacaacaaatgagcaagaaattataaacgaaccaaaaatgtgtttcatcattatcatttgattattctcttttactagtttagggaggggaaagaactgactttttccaaactttttttttttttttctgagacagtcttgatctgtcacccaggctggagtgcagtggtgccatgtcagctcactgcaacctccacatcccgggctcaggccattctccagcctcagcctcccaagtagctgggattataggcacatgccaccacacccggctaatttttgtatttttagttgagaaggggtttcgccatgttggccaggctggtcttgaactcctgacctcaggtgatcaaactgcctaggactcccaaagtgctgggattataggcatgagccaccacacccagcccttacttcttttgagttacttcagcaaaatgaggtattatttgactatgtcttcaggataaggaatgtgcttcatttactattatctagagagcaacgtggtttctggcccataattggtgttccataatcgtatgttgaatgaactactagagatgactatcttccaattctaatgaactcaaaacttaatatatgtcattagactttacaatgtaaagtaggaacacctagataaattaggaaattcacgatttatgtgactgttttgccccctattctgaaggtaacttttaagaaagagttttttcgttgtttatagcttttagtaaaggagagtgtatctggtgaaattcaaaagacttgaaatactgccttgattttcaacaaaagaaatcaagcttagaaaatacttgtctatggaaacagcatccaccatatagtagtgaactctcaattaaaacttgttaaatgaattaatatcaaccagcttcatatcaaagtaaagacctaggttgagtgcaaaaggttaaacaaaaactcaattcctgatttgctgactgtcctatattttatttgtctattattataagcaatgattatctatttgtgacatagaccattttacacaattattgaagatgttcaaaaactctttcagaaattcgtattcttagttgtatccctgttctgaaagcacatttctcttatttttaaaaaaatatatggagtatccacctattgagaggtgtcataatatagaacttgcatgagacactgaccgtgaaatttagtttaaaattagtggtcacatgaaatgagcatgtttaaaaccgagatgtgatatcttctaattacaatcctctaacaaacactgggaaaatctatgatggtctcagcacacacagaactccttctctgcagatcaaaagagagtggaaaagaccagcagtagccatgaaatatcacttgtatccactatttatgttttatatcctgtcaacagcagcatgttcatttagcatcagacacaacttattcagggacttagatgatgcagcaagtgtcaatactgatgtcactatttatagcccaataaactatactttgaacaatattagtaacattaagcttaggtagcgctcctagtattaatgccttaatacagacatattgctataagcatagtttatagcatggaacataaacacaaatgcagtgatactaataaatcactttcttgactgcttaaaaatgtactgccaaaatgggctttatgcattacacaatggagcagaaggcagtgatatatatttaaattttccatttttaagctgtcactcaaaaactttcatactttttttagcttattgatcttacgggcttgtgataagacttcaactgcttggttgggctgtttttagcttccgcttcttattaaaagagctaaatcaggaatcacaaaatgctactaatttagcactttccagtagaaatgaaaactaaaaacagcaccaaaatagtgtaaccctcatgtttcattgccctagaatcccagatttaactactatatagcataataatgggtataatggaactatcactatgtgtgtgtgtgtgtgtgtgtgtgtgtgtgtgtgtgtgtgtatacagcaaaaaataaaagcttgcattaaatatgcttaaataattgttacagaattctgactcttgttaagtattttgcataagaaaacacacacacagacatatacacatactatatatacatatgtttgcatatatatatatataatatatacataaaggttctgcacttctatttcctactctttctttaattaacaaagaaacacacatcctgaattccttaatgttttggccacttcttaccataaatacacaacctgcatccaaacaatctaaatatcatcagtagaacagctagagtgatggccacatctgatcaatcaacttgtgtaaacgatctctgccccacaccttgccaacacccccactggtctttgagtggcaaattatataccacaacccgaaaactttcaaatgctgatttggggctcagaacactgtcctctcaaacctgtgactgctctcacattagactttctacaacctcttcaggaaagggtgatttgttttctcccctcagtgctggccccaaagttcaaggcttagtgtagaagagatagtggccctcatagctaattgcccatattttgcaaagggcagcgtggaaacgggaagccacagccttacaaggacaggatccctaataaatattcccatgatgaatgagttgtgtggtcatggtcagggatcttattgcattcctgaatcttacccattcagatatgacagagcactaggtttgttattattcccccatggcatcctcctgtggcaacctaaccagtaaagatggtagtagcaactatgaaacagacacaaaatttattcttggcaaaaatagctgctggaatttttgtcactgtcattatatccaccttctgagaggatcctgagagtcatgcaagatagcaaaattggttaaaaatacatgcataacaaagaaaagggttattttttcttagtatgtctagaatcatcagtcttccagaaacagctcctattgtcaataattttaaacttcttgcaacatttccaactgagcccccagatctttcctggcactgttttactgtcagctactagcacatggacaccaccaagagtcatcaattttctacagagctcgctgtttcatttttgtacccctcacttccacgaattcaactgcttctttgaacattgcctcacaatcactcacattgggccacttcagcatgtctacaatctgcatatgtatatgtatgtgggagtatgcacaccaaaccacagaggcacatttccatttctcccccacataaatatggtgatgaattggctgcttcgagcttttctgacagccagtcgaaatggtagctacaatgaccaggggatggcctagttcctccatgcagaaaggtattcagcacacgtaataattatccatccatctcgttcacactaaaggcatggcaatgcaattttagccttataatcaagaccatatgacaaaaaccaaggccattagggaccaatttcgagtattctctgcaagacaatgattttccaactgcacttacatatgctgaatagttacctctgcacgaccgcacctgctctcatttatgtaacccccctgttttccaaagcctttcttagtaatgcaatagagcaaagttttaaaggctcacaggctttttttcccatcattattttttttcattttcctaagcatactatgaaaatactgagggtaaaatctctgctcatgccaatgaccatatttcagagatttgttgtcttcttttctgttccctatccccgataccttcatcctccctcttggccctgcttgctttcctttgaactgaggcatggtcttcagttcaggcccataattacttcacatgtacttctgacctcaccacttcaggttcagtgacataatagtgttatctctgaaaggacgtgatgtcatcataaatcacagagctgtacaggcaaaggttctacttgcaaagaggaagaatgctaaaattatttggaaattatataaaatatagctcaagtattcttttgtgtcttatttcaaaatgcttaaagaaataatataacagatataattataactattaaaacaatcatatggtttatcattaatgatatatcaatttggggggcaatgaaaaaaacataagactagtaagaaggaaaacattaaaaaacctatgcaaaatcaaaaatggcccagacactttatattactatcattactttagattttctatagattccatgctccttcctatttttcaattgttaaagagaagataaatatctctaaaacatcacttaattgtcatcttggttctttagcttatgagccaagttacatcatatctcatctctgaacgtattttttagattatgagataatggacttgttaatatgagtgcaatcagtatttttttaattgcactactccatggataaaaaaatgctataagtaataactcaacatattaaaaaaaataaaaacttcaacacagcccctctccactgaagaagtcttcacacctcttggatggccattttcaggaaagctctgtaaagatactcaagaactccctgtccctgcattggggccatcaaaaccaagttcagtttgcttcattctatatcctggaaattccatcattattcctacttcttgctgcttaatttaacatgatgaatcttggcctcttctagggaaacaagagcagagtgcattatgcaattttcaatataacgcactaaaggctcctaattacttgatttaggcatatgtaaataagaagaccttatataaaatgagtcaaagatcatgccttgagcattccaccagttgaacaatattctgattacctaatcaggttctaaatgtatgtataatgtatgcctcagaatatcaaggctatcacatataaagcagtatggttcacgttaatatatacgctatgtttcttcaattaagacacttgccagctgacaggcagaggagtaagttgtgacatctcagtagtgatcctgcctgagcatgtgtgaacttagctgttcatctgattgtcacttcattggtactatttgcattggcaacagcatatggagttgggtttctgttccctttacttttagttgacatgtaataattgtacatatttatgcggtatagagtggtatttcgatacatgtacataatatgtaatgatcaaatcagggtaattagaatatccatcatcataaccatttatcacttctttgcattgggaacattcaaaatttctcttctagattttttgaacatatacactaaattattattaatgatatctaacctacagtgctatagaacactagaacttattctatctagctgtcatttcgtatctgttaaccaacctctcccatccttccctcacacctacccctcccagcctcttataaccataattatactctctttctatgaactcaatacttttaatctcccatgtgtaagaacatccagggtatttcttttctttgcctgatttatttcacttgatataatgtccttcaggttcatccacattgctgtgaatgacaaaaatctcatttttttttatggctggatggtattccattgtgttgatataccacactttctttattcattaattccttaatggtcatttaggatgattccatatcttggcaattgtgaatagtgttgcaataaacataagagtgtagatatctctttgatatgctgatttcctttctattggataaatacacagtagtgggattgctggatcacacagtagttctatttttaggtttttttaaaaaaccctccatgctgttcaccatagtggctgtgttaatttacattcccaccagcagtgtataagacttcccttttctctgcatcctcaccagcatttgttcttttttgtctttttggtaatagccattctaaatgaagcgaaatgatatctcgttatggttttgatttttgcaattccctgatgactagtgatgttgaacattttttcaaatacttattggctatttgtacatcttcttttaagaaatctctattgagatcctttgcccatttctaattgaattatttgttttgctttgtttttgctgttgtgtttcttgtgtattctggatattggtcccttgtcacagctagtctgtgtcagtttgcaaatattttctcccatttacaggttgtcttttgacttcataaattgtttcctttgctgtgcagaagtttcttcagtttaatatctactttttggttgctgtctgtgtttttacagtcttacatacaaaatcttttcctagaccaatgtcctgaagagtttcctgtatgtttttttctagtagtttatagtttcaggtcttccagttaagtctttaatccattttaagtttatttttgtatgtggcgagggatagggatacagtttcaatcttctgcatatagatatccactttccccaacaccatctatccttctccagtagtttacatcttgtggttgcacagccccagaacttcagaaacatcctaaactctttctttctctaacaacacctcaatgaatgttattggcacctttgtgggaaatcaattgcctataaatatgtggatttatttctgagttatctactctgttccatcggtctatgtgtcagtttttataccagtaccatgctgttttgatcactatcgctttgtagtatattttgaagtcaggtagtgtgatgcctccagctttgttccttttagtatttctctggctatttgaagtcttttgtggttccatattatggaatttgttttaacttaaatttgaatctcttaaaatgccttcaaaaaagattgtcttgtggtgatgcactaggtataatgtcattgtgtacgaaggagctatcctatcacatgcctggcagtgcagttagagagaatagaaatagccaagtctttcagaaaaaacaataaaatcttgaaagctaacagaggttcgcatgaacaattcctatgtcacttgcgtaccaatatttatctatcaaaagctttcaatcaaggaataaacaaaaccaaaaggttaaccaaataggaaaaaccacaaaatagaacaaaaatgagatgaaatcttaatattctgcaagtcttgaaattatactttcaatcttaaagttattaaaggcaggttatgaaaagcatcatatcactgtgatattaaaaatattgactggtggataaaagtgattccaaagaatttaaatgtgaaaaggacttggttagattcttatacttctttgctgaacattaggaatatcactttctttttactttcctcctcactggttgcttcttttatctactctctgttgattgttgctcacctcccagtcctctaaatgttaaagaagccaagtccttggatctcttcttttatctttctacactctccctaggtggtcacagctagtctctatagttttgaataccatatatgtacttacaaatcccacatttataaccttagccaagatgtctcctgtgaacaccagactcatttatctatcttcctactcagcacatttatttggatcgaatatgcatatttgtctaatatgcatctcaaaattaacatttccaaaaatgaatccacattactctcattctttaagcaaatctatccttccccaatattttacgtcttgtggttgcacagccccaaaacttcagaaacatcctcaactctttctttctctaacaccatccatgcaatccatttgacttttccttcaaaagatatccagagctgaccagttcccctcacttcatccttaccacctctatccacagcaccagcatctccctcctggaccagggcaacagcatcccgactggtttccctgtctccaccctcggcctcttcagtctattctctataggcaagccacagtgacatgcttttcttttttgaaagtctaagtattaaattatccattaaataactaattattgcctacgataagacacacagattttaggagtaaagtttgatgagttttgactattgtaaaaccatctccaccaagttacaggacattcctatcatccccaaaagtttcccttatgatcctgtccactcaatcgcctcccagaggaaaccaatgttctgattcctgctatgaaagtttagttttgcttgtttcagaaggtcacatgaatggaaacgtatagtacgcaccaccatgtgtccctggcttcctttaccacagcataacatttatgagattcatctgttattgagagtattaatagttatatcattttattgatgagtagtattccattgtataaatatcccctaattaattcattatttgttgatggacatttggggttgtttcacacattttagctatatgaataaagatgctacaaacactgcacaaagcttttttgtggacttatccttttgttgttcttgagtaaacacctgagagtagaattgctgggtcataggtaaaaatctttagtttgataaaaactgcctatttttcaaagtgttgtgttattttcacactcactagcaatggataaaagttcagattacgctacatacttgtaagcatttgtcagtgggttcgtgttgatattgttcgttttaattttggccatattaatgggtatacaatggcatctcactgtggtctttctctgatgatgattgtgaatatatttccatatgcttagtgaccatttgtatatcttcttctgtgaggtgtttgttcaagtcttttgcccatttttaaaaagcgatcttttaaaaatatgttagttcttaacacttctctgctcagagcaatccaatagcatttcagatcactcactaagagccaaaaatatttacagcatccactaaagcacaacacgatctgccgctcgggtaacattatgatctcatctcctagtactgctccatctgcttagactcttcattatcctggtgtccttgagcaaccaatcaccagacctctcagagctcctgttccctctgcagggattttcttgtcccagagatccacctgcctgttttctcacttcctttagtaccttctggaatattctgcacaaaatagcaaccagatctccagcattccctattccctttatccagttttatttttcccgtaacacttacccatgaagacgtgattatttttacacttatttttagttccttcgtccctctctctttccctcccttttgcacttttatcttccttctttccttccttccctccttctctccttcctattatttatagtttatctcattctaccaaaatataagctctatgaggacaaggaattttgaccattcattccacaacttttgctcactactgattcccagatcctagaacaagtttttaatgctccagaagtgttgagaggaatatatatttgaactctttaccaacttaaagtcataacattttagtctttaactatattttaaaagcggcagatatatctatttaaaagaaaaaaaaacacctaaaactgtgctcccaaacactgtaccaaatcaatttgatttttaagaaatgaggccaggaatgttcactcgtgcctgaaatcccagcactttgggaagccaagtcaggaagatcacttgagcccacgaatttgagaccatcctgggcagcatggcaggaccctatcttaaaaaaaaaaaattagctggatgcagtggtacacacctgtagtctcagctgcttggagggccgaggcagcaggatccctgaagcccaggagttcaaggcaggagtaagctctgattgtggcactgcactccagcctgggtgacaaagcaagaccctgtctctaaaataaataaataaataaatatttttaaaagagtttttaaaaactgagactgagtgagcacgtgaatcaaatagacttcatagaacaaagtgaaaaattatatattttatatatgcatctgcatgtatacatacatctgtacatatacatgtatagagaattttttaagtaataataaaacagacagataaactaacctatactgagcacttactgagaaactgttaaacctcacaagaattccaggaggaactattcccactttacagataagaacattgaggcttagggtgtttaagtaacttgttaaattcatacagctggtcggttccagagtcagtatttaaactgtattatattgtatcactttgcctaaatattatatgtgtgtgtatgtacatttaatttgaattacaaatagaacattgaagaataaagtctgtaatgtaaaaaaaaatctagtcccttccaatgcttttataacattatcattatgtacatattttatggtgtttgaattttctttttgtaatcattagcgactacatgtatatcatatatgtaggttatgaaacataataacagaataaactctcatggatctaccaaccagcttaaataatgagcattgccaaactatcaaagctacctgtggacccttcctcaattccattcagctgcattcctcaccagaagtaaacaccacctcaaattgtgtgcatatcattcctttgttttaattagaaatttgattacatgaatgtgtccctaaatgaggtattgtttagattatttctatgggatttttcaagatggtatcatactatctatagtcctctctggttgttttttgttttctcattcaatactacgcttttatgactcctccatgtgtttgtttgtttgtttgtttgtggagacagagtctcacttgttgtccaggctggagtgcagtggtataatcatggctagctgcagccttgaactcttgagcccaagttatcctcctgccttaatctcctgagtagctgggactataggtgcatgccaccatgcctggctaatttttaaaaatataattttgtagagacagggtctcactgtgttacccaggcaggtcttgaactcctggcttcaagcagtcctcccacctagtcctcccaaagtgctggaattacaggcataaatcaccaggcctggcccagttccttcatgtaaatgcacatagctgtggtggttcattgattttaatgctctactgtattccttgtaggaacataccaaatttgtttgctcatccttttgcaagcttctttcatcagacatcaaaacatattacaaagctactgtaagacaatatgatatttatacaaggaggaagagacaaagtgatcaatgggaccaaatagagagtttacaaaaaagacgttgccagatggtaacttggaatctaacaaagtaaattgcagatccatgggaacaagatgaactattctgtaaattgtgctgagataactgattaaacgttaaagaaaccctaccttataccacacaaaacaaattccagctggactaaatgtgaaaagcaaacctctacaactttaagaagacaatataacagaatatctttatgacctctcagtcagcaaaaagaaaattattttgccagtgcaaaaattaccaaccataaaaaaatgataaagtctatctggatatgaaattatttttatcaaaggataccataaagaaaataaaagaaaccacaaactattagaagatatttagaacataaactacctcttcttaaggatttcttttttaagtatattcctacattccctgacatagtcacaacttgagaaatttactcttattttttttttttttttgtctatttcttcctagagcttggaagggtacctggtacttgatacactgttgattaacaaccttttattttaggctgttttctacggcagcatatgtaaaattttaccttgctttaaacaaaggctactaactataggtggcattgttgtaacatatatcatgttctcaattacctgcatgacagcaaagattgatactagtaaaacttcatttaagttttttaattcaattgaacgagaaggtcattgacacttcagtaattgctattgaaaaccatttggctaaaagagaaaaacacacacatatacgcacacaaaataaattgtgacataatctttaccacagattattcactttaaaggaatttcccactatgattcttgttacaggatcattattgcaattattttacctaagaaattatctgatacttctaaccctatagtcacacatgacataattgttacagccataaagaaagaaaaattgtcagtgctttctgctatttttttaactgcaaatagaaagtccagtttttaagctttgttcttattcgaaactatggaataaacacaaaagaatcaaaagaactagcgagagaaagaaagtggtttgggagaatctgagagtagctcccttactacagatggctggcaagctggtaacctcagtgtgagaccctggcattgcctaagtactactgaatattggtgacctggttatttcctcccaactaggaatctctggtcaagtctttgagtttttctgctttcttctctgtcttcattccaagaagacagggcttagtgtagctaagtgcctaaaattcccttgtctgtgaatgtttaaaaacgtgttcccacttgaaagcatggcagagacagaggtgtaaatgaacatttcaggctacaaatttaatctgtaaagtcctgcatctgttgtctcatccattagatggtgtgtttccacaagtaggaatcttttttttcttttttcttttcttttctcttttttcttttctttcttattgttaaattataaaattcactgctaggctaacaaatcttgttgctaaaaaacaaagccagcacgctaccagaatgtatgaacagaagtgcactgtataggaaccattgaaatctaatcactttaaagctttctaaaaagacactgtatttcaggactacataaccaatatattatgcagagaaaacttagagctcagaaaaaacagtgaacatgaacataggtgtagaaaatagcaactgagaacgtatatacaattaatatgacaagacgggaagtctaaaaaagaaccaggtagaatatcagttcctgtgtgcagagaatggctcctgatattgtgaaaatgtggaaatccacatacctgggttagagacccatacgtgtcacttacaagccatatgaccctgaacaagttctataatttctcttggttgttttgtgaaaggacaggaaaataatattcaactcactgagttgtttggagatttaatgagatgatgtgcttaaagcactttgtacactataaggcgctatataaatgtgattcatctacctaaagaataattattaaaacagattatccctgaggaaagaacaaaaggaaatgagtctatgaaattatagtgaaaggaatgtatatcacgcagtgggacaagcatcctggctgtgacactgattactagggaagcgacagagttggtttctgaggttataaaccaccactgcttgacagaatgaaaacaatcttgcttagaggtaaaatcatagagtatgtgacactttttggtgccacccgggataaaaataattgggctcaaagttaatacaattcattagatagttctgtcttctaaagacaggcttaaaccatgtttcctgaggtcctgaggaatctaacagagtcaagccacgtaattctagagcatttgatggcttcctctcgtacaagttgaatgaagacttgtctatcctcctctattatcctaaaatgaagcttttaaaaatgagccaccaatctatacaaaataatttgatgacattttgccaaatattaagccacgcagtggtgtccttagggaaacccgagaagaggaaaatcacgttgtgctctctgatgccttccataagggacaccagaggccaactttgtgcagggctctatggaaagtacaaggaaggcagaggagaagctaaagcagacacagtctctgcctcaaagtgtctcggtctagtgggagagtcagccattactcaaagccacattaggaaaagaagtgatctgaaagtacacaaaacagagatttgactgacagacagaagccagctaaggattccctaaagatgaggagacaaagtagatatctgagaaaagagtaggaattaatcaggcaaagatactacctggagatttctaagcagacagaacagcagatgcaaaggtcctgtggcaaaaaggagcatggtgattccaaggatctgaaagaaggcaggaagacaggtgcacagaatagaggatatggagtgagatgaggtgcaagaggtgggtagggccaagttaactagactttgagggaatgcttaggattttggtctttatcctcagagcaaagcaaagtcactggcacaaagtaaacgtaggtgaagagaaagtaaatcacagaacagatgtaaaaactgcatgtggaagggatcaaggatggccttagctgctttgcaatgaaatagattaaagatcactggctgcctccttaagtcacaggtctgctgacagcaacatcatccactccatacccccatccccaaaggacactgtatagcctgatcatctccacttccctatcccatgggcaactctgctgagcaagtcatttgcctcacagaagctgatgatggctctggggagtttagataatggcagtatatgatggaatatgcatttcctaaaatggaatgagtgtatagaggggtaagggtggcagctgacactgagcgtgaatctgtatgtgtctacctaacgctaaagctacacctggaaggaaaaatcattacccaaactcacttcttctttctggtctagataatggctctctatattaaaaatgttcctactattagtagttctttataaaaggagaagagaaggaaaaaaaaaacctctggcagagaaataataacaaaatgtatgatccacagaggtggtgggaagatataacgttattttacatatttgatatagagcctaaattaagccatagaaaagaggccatgaatcttcatagcctcattatcaagcttccctaaacctcaaatacagaaaaatacatttcataaacaaagatccaataggattttaatagttcaataaatttcacagacatttgcactaatcacatttcattacattttttaaaagaaattccattgatggagtgtcagattttgaaagagggcacaaaatatcttttgggaagctagttttggctaaccatgaaaatgcaagtcaaatgtatcatggacaagtcaaatgttatgcaaccgaaaagttacacatatgcctttttttttttcctacttcttgactccattgtgtcaagagtcaatctcttaaatccctcaggacacatctttcctccaaaccatcccaacctgaatggcaagaaattcagacttcagtataagctgtcagtccctaagatgttctatggtcctggatgcctatcagcagctccattttttcaagatgtagatgaattttttaatgcaaggcttcatctattaattaccaacttattgaaggcattctagtttgaatgttatcaccacaatcatctcatccccagtgaaagaaatacatttatccagtactacaaaccagggcacgagaggccctgacctcctgtggctggacccttctccatggtatggccgaggggacatgcccatctagagcctatgcccgtcttctaggaattccctactcaagtggttctaggcctacttcaggtctgactccatcctcccagtggctgactagtctattagatacattcctaggcctggggggaggccaaagggcagctatattaaagggatatgaatgtgcagactagggcatccatacaggtgtgcacaaggcactcagatattggaaagagctgggagtaggaagggggtcagattagaggctgagggctgagaaacagttcttgtcatgttgccatggtctggtgcactactctaagaagtctgtggattctaaattagagcttggccttccagttcattctgaacactgccattcaaagctcaatgtactaacaaaatacctgggggtcttgttccaatgcagatctgattcagtaaatctgaggtagggcctgaaagtctgcatttctaatgcgctccaaaatgatactgacactgctggtatgtgggccacattttaagtaaaaaggatcatgaaggtacatttgtcaaggtagaacaatagaacatgttttatttaacaatttataagccaggtacattcatggtacctgggtctccatttggacacgtgtcctagcccagcaaatgttagggacattcttgcatttatctttcatcagaatgatctgcccacttccacagaaatctcatcttaagggaagaatcatgttggagtataacgtgtcaacaaaagattatttgtatccattcattctgcttcagatgatacaccagatggttgttcaggctgtctatacgtatgaattctgatactaggagcaaagtaaggatttgttgtccattggcagcaagtccacttacttatcttcactattcccaagcccttgggctcaacctctaggagtaatcatcttgtaaacagaaaccagaagaacaagaccagaaggtagaaactagccacactactaggaaaacatatgccttcagtgggtgcaggctcacctgtaaggaatttagatatataggcatctcccaggatggccttccttccatgccttttcttccatgcccttccctcatcatggtgctcaacttccggctcttgttttcttatcctagcatcgttctgaggtcccagggaacctcagtctacttcagtctattcctgctgaacaaaaccagcccaagttttccctgtgcctctaaaattccacattgcaaattccactgtattataagccactataaaccaatggccttccagctgtcaaaacccatgcatcctacagagggtggctgcttttttaagaaacaaaaacttatacatacaaaagcgaaaaggatggaatcccactcttagtcaccttatttgtttctggctggccctacttgcatctcatgccacaaccctcagcactccagccttgtgtacacatccatttgaactggactacctgagtttcctaaacaagagcttacatttggccttgtcttctactctttttaagaaaataaattttactgtttagagtagttttggtgtgacagcaaaattgagaggaaggtacagggacttcttaagtatcgcctacctaccctccacatacacagcatcgccccccctccccattgatattccccaccagaggggtacatttgctacaactaatgaacttacattgacacagcatttccacccaaagcccagactttgcattagggttacttcttggggttatataaaggtttggataaatgtaatgacatgtacctattattataatatcatacaaaatagtttcactgccctaaaaatcctccgcagctcacctcttcaccctgcagtccccaacctctggcaaccactgatctttttttactgtctccataggaccctgccttttctagaaagacatatagtttaaataatatactatatagccttttcaaatttgcttctttcatttagtaacatgcacttaagtttcctttatgtattttcatcacttgatagctcatttctttttagcagtgaataatactccgttgtctggatgtaccatggtttatttaactatgcactattgaaagacaatttggttgcttccaaattttggcagttatgaatacagctgctataagcatatgtgtgcatatttttgtgtggcacaagttttcagcttatttaggtaaaaaccaaggaacatgattgttgaatcatatagtaagagtgtgtttagttttgtaagaaactgcccaaactgtcttctaaaccaaagtgactataccattttgcattcctatcagtaatgaatgaaagttcctgtagtttcacatcctcatcagcatttggtattgtcagcgtcttggattttggccattcaaataagtgtacagtggtatttcattgttgttttaatttgaaattcctgagtcacatcatatgatgttgattgtctatcttatttgctatttgtatttcttcttttgtaagttttctgctctggtcttttgcttattttttaattgggttatttgatttcttattgttgagttttaagagttctttgtatattttggataacaatcctttataagatgtcttttataaatgttttctcccagtctttggcttgttttctcattcccttgacagtgtctttcacagggaagaaatttttaagtttaatgaaatcaattatttatttcatgaattgtacctttggtgctgtatctaaagagtcattggcatacccaaagtcatttacattttctcatatgttctcttctaaaagttttatggttttacattttacatttaggtatatgacacattttgagttaatttttgtgaagaatgtaagatctatgtctagattcattcttttatttttgcatgtggatatccagttgttcaagcaccatttgttgaaaaggctattttttccccattgtatttccccagctccattgtcaaagattaactgactgtgtttatgtggtctagttttgagctctctattctgttacattaatctacttgcctattattttgccaataccacactgtcttgattactgtagctttaaagtagtatcagttctctcatattattctctttcattcttgtgttgactagtatgggtctttttttttttttgtctctataaatttaagaatccatgggttgatatccacagactaacttgctgaaattttgattggaattgcattgaatctataggtcaagttggcaagagctgacatttggcaatattgagtcttcctatccatgaacatggaatatctccatttatttagttatcctttaactagagttttgtagttttctttgtacagctcttgtacatattttcttagatttatactcaagtgttttactttttggggtgctaatgtaaatagtttactactcttctgcaaggaattttcttctttgcttccactctttctagactaactcctttagaaatctcaggtctgagtattcttactttgggaaatctttcttaagcacatatttaatcattcattcattcactcatgcatttacttaacaaatatatatggtgtgtttactatgtgttagttgttattctaatctctgaggatatggcagtggcctaacattttctactgtcatgaagctcaccttccagtgaggagaataaatgtaaacatagaaaatctgatattagtaacccacttgaggagagatattctttaagtattcgatgaatgaatgactaaacgaatgaatgaatgttgaaattttctgacccttatggtgttcaaggaacttatttttgattaagtttttcctcatccaaattgaaaaaaaacatagaaaaaaacataaaaaataggtaaacctattttatgtttccactgaccacaacccatgatctaacataattataagtttaccttcagtacttagtaaatacttaagtgattgactgactgatgttttaggaaccacattttggactattggcccttctatagaaattttctttccttttttgagacggagtttcgcttttgttgcccaggctagagtgcaatggcgctatctcagctcaccgcaacctccgcctccctggttcaagcaactctcctgcctcagccttctgagtagctgggattacaggcatgcaccaccatgcccggctaattttgtatttttagtagagacagggtttctccatgttggtcagactggtctcaaactcctgacctcaggtgatccgcccacctcagcactctcaaagtgctgggattacaggcatgagccacggtgcccagctgaaattttcaagcaagaatgttaaatttgtgatgttttcaagcaagaatgttaaatttgtgatggaagatgcctttcataactgaggtgtgaattctcttgaatctgaggggaagagacaatggcacatgaaagaatcatcaccttctttatttcaaattcaaatttctcccttcctcccatcccagattctaattcaaacagctacaaccccatagcttttcaccagagtcaagttcaagtgggctactatattagacagaaaaatgctaagaatcacccatggaaacattactgaagccaccagagttttactatcaactggaaaatccacaaataaaatgagaaaatgcatcactaaaaatctaatgtgcagttgggtaaatgataaaccaatttgaattagtgaatactaattgaaaaactgcatgacaaagtattttcccattaaagcaggaatttgctaaaggcattttcaattatgtatcatgcttcagtaaaaagcttcacacattctaaaaacatagtgtcttcttcaactttgcctcctgacggaatttttagcacaatggctacctagctcagataactttaaaaattagatgccaatgaccttgacaaggttcttcaatttttatgtggttctttttttctctctggtcctcacacctaacagaacagatgtttttaacttgagaacctaattattatctatgagtgttaatatttttaacctaatcatggtttatctgcatcccagaaactcacagttcactgtgctttgctagacaagtagaatatttagaagttttgaccatctaaaaggacattttagatgaaggactatccccctttgaagttcacaaatatttgaatgtcctttcaattgcttagataccttactcttctcaaaatcagggcagaggtgactgctgggagccaaaattgtggattccaaacctacagggaagggaatatatctggaacataataccctgttggtgctcaataaatgtttattaatgagcccctttttttgacccaggcacagagaataaatccaaggaaggaagattatgcaaatagacagaaaggtcacccagccctacatgggggtgtggcccagggtgggggcagaaccaagtcattcaggtgacaggacattctcttgggtgtatagcagtgaccctggaaaccctcattccaatagttatctgctccattataaaatagtgtagaagaacatttcagccactgactgcagaaaatactgtttgagaaaaaaaaatatgttctctccttacaacagtttaaagagattcttaggccagagaactcttgatgaagaatagacaatgaagagaatcaaagtgagatctataagaatcattagtaattggaatgtccacattgcataactgcagaatggagggagagcactcatgaagccagacttagcaatatctttacagtgaacagatttattacgaaagcaacgtgttagaaagaagtacacgtattggaaatgcgtgtcatccaaactgatgacattgggcacgggccattccaaaggcaaaattcgtaaaacaatattcccctctctgatataaaacagaaaagccatgaaacagttaccaaaatgcctcaaaagattcatctgttatttctcctcaatactgcagagaaaaatgtctctgtgatttggcaccagtcattagctatttaaaattattggttttaatctagtaagtaaaaccgaaatttgcaatggtttattttaataaaatatttatgatgcttcaggaaaacagctaaatagctctgatctgaaaacgaacaatgagactgaactaaattgatttctccccagtaggacatacagctcaaaacacacacacataaaagagtgacacgtcaaacactaaactgtatttggtagacattgtcttcttttaattgaaatcttatctgaggtgaagattatctcttttccttcagctacgctaatctcttctagcctgaaggcccataacttgtgaattactaaacaatcatatttgtagcagcaaattgatttctgagagattcatattgattgagatattcaggactaatgattttgaggttagggtgtttagacattattacctctgatgaacaaaattggtagagtttttttttctatttatatttttttccattaatagatagttcaacttgcactttagccttgaatccacctatcagaccaattggagtgccagttggctttctcaactaccaacctgatatgctaaaattatgccggtttttgtccacattcataaaaagatggcaactgtgataggtgagtcaagtggtcagcaatctatcaggagttactgtcagagttatagttgttggcttggctaattaggcttgctcctatcttagtaactcaggaaacatccctgaaccacaaataattgccaatgggacacctaagaatcactggatgagagtgaagtggccaaaactgagtacattaattgctagttaccagaaaaaaataacaccaagtacacagtcaaatgtacttcactgtaggccagaacctccatgttcatatacaaactataatccatactaacatacagcagtagcatctaacagtattaggaatgtgtcacattgactctgctcatcaacggactgtctgggtcactgacatgctggaacctcagaaggtatggtctcagcacttaataaggaggattatctttatgacatcaattctgtagaaacacaagtttaagtgtctgctctgccaatgactggctgcatacgcttagtcagagtatttaatgtcactaggccactgttatttcatctgaaagatgaactagtatgtactacataagtgcaacaagaacaaagtaaataaaagcttttaaatttttaaagtacagtgcaggtgcgtgtaaaagtttgtgttgttctggttgatattaaaatgagagattaaggtatttaaggtagtggaatgggagtctgtgatttgaagattttcattctcttttaccctacatctaaaccatcgccagatcctgttggcactacctttgaagcagacccagggaatctaaccacttctccccacctccatgtctaccactggagtccaaaccactgtgtgtcctccctggagaactgcagcagcctctcaatgaggctccctgcttctgtcctagccccttgtcggtctattttctaaacagctgctgggatgatccttcaaaaaggtaagtaagatcatgtcactcctcacctcaaaatcctataaatggttttatctcattcagggtaaaagccacagccatgataccggcctaatgagcctacacaccctgcagtactcctgtttctcctctgacatcacctctcattgtcctctccatgaggaacttcagcccagtccttctgctgtcctcgctttacttgaacataccactcagtccccttccatagaatgtttgcacctgctgttcccattatggaatatacccctcccagacatctacacaaccactccctcagtgttgtcaggtcgctgctgttgccccagggcccagaagcagtgctggacccatatgcagatgttaaaggatggctttaacatcttaacatgagcaatggctcatgcctgtaatcccagcactttgggaggccgaggcgggtggatcacctgaggtcgggagttcgagaccagcctgactaacatggagaaaccccatctccactaaaaatacaaaattagctgggtgtggcggtacatggttttaatcccagctactcgggaggctgaggcgcaagaattgcttgaacctgggaggcagaggttgcggtgagctgagatagtgccattgcactccagtctgggcaacaagagtgaaactctgtctcaaaaaaaaaaaaaaaagaataaaaggatgaatgaatgaatagatgaatcccaaatctagctactataacagcattcttgattcttaaaaacccataagcgtatccctggtttttaacaaactatatgttcgggccactttcaaaaactgtgttatcctaattgtcccaaccccactagttataacacagtaactcagtcacaaaccccggtgtaacttttgagcttacaattacaatagaaaaagattattatcatagtagaatcattatcattaatatttctttttaaagaacataagtaggtaactttcaactatattcatcttcccaaaagtcttgctaattagaaagactatagttaaaagtactttattgtatatttcaaaacagctagaagaattggaatgttcccaaaacaaagaaaagacaaatgattgaagtgacagacatcccaattaccctgatttgatcattacagattgtagcatgcatccaaatatcacatatatcccaaaatacatgcaactattatatatcttttttaaatctttccagttgacttatgtctctgaaactcctgatatgacaataacctagacctaactcttgcaggtattcattttccaaaggggaaaaaaatagcaacaaaaagatctcaacatttcttaagctgagattcataatatttttattcctaaaccacatatacattagcctccaaagttctcagggtaaaaaataaaaaggtttataattttttaaacagaaaaaaatgggcagcagcactttaaaacttctcagtttgaaagagatatgtttggtcaatgatctatttttatttctgctctgctgtttcttgaggagtccaatgacaaggacctgtccttcaaagttttagtctgtgggcagagaattagcattttcaattactttccctggatgaagtatatgggtctctttccctccccacccccagacttttctctcattctctctctcccctcggaggacagggagggcagtttctgggttacacttccttttgtgcttttttttttttttaattttctttcagaattttctcagcaggctacaatcatgctttaagaagtaatttataaatattttttcccagaaaaaagaactgcaaatataggatttaagcatcatatgatatctgcttaaactgttgacactatctgttttagttaacaaatttgttttatgtcattcttaatcaacagacatatggttttgttacttttgttgattctgcagcaaagccagttaacgttgttattatcttggatacatactcagaacagttacccttacagacatttttaataaaaacaaacaacaactgggtggactcagaaatgagatcagattgctttatcagccaaggaacaaccattgttctatttcacatagttcatattcttctttcaatgtcctctctcttaccaaccattttaaatacaatgatctggtcagatcaaggacagacatggaaaggggaagacaaaaagaagcaacctctgtttaacttttggtaaaaccagcatccaaagaaggaaaaccagaaagtacaaaaagctaggtgcacgggttgagcccaggtaacaggagccataaattcttctatcatgatgcagttgccctgccaatttggcggaaaatcttggagggcccttcctttattctggctctagtctctattaaatcacagaaataaatgatctcaagcactttggaaatatacagtgctcactaaaaagacactcagaattctgaaaatattcaattctcaacctttatatagtctgcatctctacttttaagtcttgaggagaggtactagagaaaaataggtagtctgggatctaatccctttgattgtagaatgccctttaatcaaagaggttaaggaataggcaactggtcaaataacccggacatctcttttgtcaatgggaaagaactacatttgttgagtacatgcatgtgctggttccctgtgggattcttcacatatatcatttgaaggaagagatcccaggacaaatcattttaccttcttatcccacaaagctcagcaggaaatggtcttgacccatgacaaagatttcaaaaagggctgctttccatgacaaatccaaccaccttctaaatgtccatgagcttcacaattctcccagggctgaagtttccttcagagcaggttaagcaattatctaacacctaatagaaacttccaatccaagtttcttggaaaggtgtatctaacaaaattcttagtagagtcctacattaatccaaaaagtttgaaaaaaattggtagaaattaaaggtagataaatataaaaaatacaaatcactctaataactctaaatgagtaacccatttaaagccatataagcataacccagcacttcaaagtagaaaatgctcctaaatgtgtgtgtgtgtgtgtgtgtgtgtgtgtgtgtgtgtgtatgaaaatgattactcctcttccctcatccactccaacctccatagcttaaaataaaaataagttggagagaattaaactaggacactactccatgaggttgcaaatgtttaagctattaggtgaatctctaaaccatgtctgtgctgttggctgttttattaagtttaccttcagcagatgtaaccttcataacccagtgtctccataggtctgacatttacctggcaatatcttttcaaagcgatatccttcaatgctaaacacctcttaattaggggctcattgaacaaaggtagcattcatctcttcatttacaaagagaagcaacagcagcaatggtagcaatttttatttgtaggaacctaactgccagttagactcatttttattacccttcagtgatgtggtttgtgttttgttttgtgcttaaatgatggattgtagtcaaatgagtctgtctttcctccttattactcttacggttttcataaagaaggaaaaacaaagagagagagtttaggtaattgtattccatatccagcctaagtcaagttcattagagggaaaagaagtgaatttggagcttcccctactctttttattagtttaattatagtggacaccacagtatggagcatctggaatggagatggagtcatttcctttcttatgtagtgctcacttagtataagtcatgcctatagtcataaaagagtgaaagccagtagaatcttgctcgctctctcttattttcaaggtgtttctttcattgtttggagaaatcctgggagtcttattggagcaagtaattacatacttgctcaattattggcttaaaaatttttttagcataaatttcctttactgtcctctagactcgcacatttactctagggtattggacctatctgtcaagctcttaagagtcaagttttaatgcaacctaatggtaccagaaggaaaaatccttacaaatgggagactacacaaacaaagtttccaaggaggatacatacacacacacacacacacacacacacacacatatacatatagatagatgcctaagatataatgtgaactaaattttaaaagtagacttttatctacacatatcatctttattttacttaatatttgtagtggactttctcaaacccttctacatagaatgtgaggactgggaagctgtaacccttactgaatagaagaaatagaagcacagacaataagtacagggccaagtttcctcagctggcaggtgccggggcctccaggaatccaagtgtcctgactccctactcagcattctttcttctaggcaccatttatcatgccaggtatctgcaacatcctgcattggtggctaagaataattaaccagctgggttgctgtggtttgaatgtccccaccaaaactcatattgacatttcactgccattgtaatagcattaagaggtggggtctttaagaggtgatcaggccatgggtgaccggtcctcatgaatggattcatgctttattattcaggagtgggttcataatctcaggagcagattcctgataaaaagggtgagtttggtccaatttccccttgcttgcacgtgctctcttgtccttctcccttccaccatgggatgatgcagtaagaaggcccttgtcagatactggaaccatgctcttggatttcccagccactagaattgtgagaaatgaatttattttctttatagattatctagtcggctgtattatgttatagcagaaggaaacaaactaagacatggaagaatggggaaactgagacaaagagaacttatttgcttaaaacgagagctggcaaatgacttctggtgggccaaattcaccacccccaactcccaccctccaatgcctacctttttaaaaaaaagttttattgggacacagccatactcattcatttccatattgcctaaagctacttttgcactataatggcagagttgagtagctgtgaaacagagactatatagctggcaaggcagaaaatatttattctctggtctttacagaacaagtttgccagttcctggcctaaggtacacagacagtgccaaaattggtactaaaacccacatctagtaacttgtttcacacagagaataaaatttaatctagtcaaacatgctaatactcaccctaccagaatcaacaaggatctcccggacactgtggcctcagcactgcaaagggacatccaatatctatctttcaacctctatccacatctctagtctcatggacaacccagtttctcagtaccccaatactgtgtgcagtgcttctgaatgtcaatctcttccatgacagtcagagcagaaagagccatctctatgcaagtaccctattctcttcccctaaggtatagtaattttgtgttgaaaaggaagttttttccacatgtccactaatgaaatgagagctgtgagccactgtggcttctcaaagaaggaggccaaggtctctttcctttattgtcctcttcagctttttttccccagagagctcaaattctgggagctgatcaggctacatgcttaaagaagtgaaatattcccaggtccaaaagccacagtgaccatgtgcacatgagctgggacctcttctctttcactcacttaatctaaacagttatccagccttagagaggagaagtttgctccatgctctctctccctcccctcctcccatttttgcctttttatttggaagttagctggatatactcacaaatatagcttagactggcttgacttttcaaactgcaaagtctctctaaacccctacccttcccaccccatatcactggccctatcttcttctgccccagttcctcagactatggtatggacatgttgaaaaagactttccttacagggagttaatgtgtgattcaggattggctttaagggataaaatgcctctcctcccaactctcaactaactttagagttctgctttgagatttgacatgaaacagccagccacaataccgtatgcatttatctctcttccatcccccattccacacctgaatctgccatttgccagtcactgtcttcttcacaaatatcccttggggattccaagaggtgggaagcttgatcatggccaagattcttagattcttgggtcttctggccatgatatcagagagacaatataatgcaggatagtggaatcacaacatctgatttcaaaatccaggatcacctacttactagctgcttgacaagtcactcaaactgtgcctctgtttcctcatctataaaatgggaatgataataatccgtaactcataggaatgttatgaaaataaatgaattaatagatgtaaaggacttagaactctggctccctaagtaaagactataataagtgtttaataactggaatgaaaatttaaattagagtttaaaggaaaactggcaccaagacatcatgctattatatagacagcttgcccatttcaaaagaggttttaaaagtgatttaataaaaatgcacatattgcattgagccactcactctttgtaaagtaattcctaaagctccaaaacctccagaatcaaatgatgcaatatttaaaatggacacctcccaaggaagtgtctaaagcatcacactgctaaacctaaggactcttccatacaaaatgctatttttcccctttcttttctttctacccaattaaaacgctcactttccaatcccaattcttttatttcatgatgtccatttaacaaccccctctatggttactaaatcctactttttcttgttttattatgaatttgtgtagcattaatgcttgcgttccatgttgcaccactgtgcacagaatggtaactttggtcagtaaaattcaccagctgttacctccatgtctgctgctgatacttgctcaaacacaatcctattgtataagtttgagtcatgtgtgttcaactgccttttagacaactccagctatatgtcccagaaaaacctcaaacctgacaacattgagacaatgcacaatgttttactccaagtctgttttattatttttattccccaacccagtcaatggcaccatagcttactaatattttccagattttccagaaatctatctaatgagtgaccagccatatctatccccatctactgaatatttagtaagtccgtgggacctctccaactccacgggaactgtactgtttacccacattatctcatccaggatcactgcaatagcctctaatcttgactgctcccccacccatttcaattcaacttccaaggggctgtttctgtaacctcaagctgaaccacccctccacaatactcatgttacttaaatggcatccccattgctccagataaatgcatatcccactgcatggcatacaatgtccattacaactctgttcattaattgaacaatcctggctccctcgcttgcctctactcagtcatcttccattttatacttcagcaatatagaactaatgtagttgcctgaacaggtcaggcggtctcctgcctttcatatgctcttctctcatcctggaataccatttcccaccttatccatagggaaactactatttatccataaagtctcagctcaaatgttacctatttgcatccttttctgactgcactatttattaagtacctactaaggcaagataccatgccagtcactaattacgtagcagagtacatgaagcaatatccacaggtacaattaccccttcatccatgctacctctgcccttgctgccattacagcaagaacgttatcgagtgggagttatgtatatatctgtctttccattctatcataaccacaatactcaataaaatatatgttgaaagaatgaaaaactataatttgtctcttcaactaatttgtcctctggtttcactggatttctcaaagaacgtaatctaatacaaggtgcagtggtcaagagtaccggctttggagtcaaacaatctcagtccctaacttgactttgctattcattagctctgtgaccttggataggctacttacggcctgtaaaatggagacaataatggtaccctatttcatagtgctgtcatgaggagccgatgaagcaattcgtgtaaataactcaaaacagcacctcgcacaaaacaactcttcaataaatgttaacttttattattttatatttaatactgctcatctatacatataagagacaacaaattatagaaagaaataaaaattaatttattggttcaaatagttacttatgctataatttttactacccatataatctccaattgtgttgaacctaaagagttaaacacacacacacacacacatgcacacatacgcacgcacacacagcacacacatacatatgcattttccaaaccaagacttgtcacctgaggatgagggtcagagaaaggagtgctgctggttatggatgttaaataaacaattttttcttacaacaaacccctggcaccctgttctcaccatgtcatggcctgtgatgacttagtgtctcccaagcatgaccaagcgattagcggggctgtgtctgtgcatctcgacagtaatgggagctctctttccatttgccatgtattgaagcctgagcgcttcgctgcttcgtgcattttcagcttgatgaattcattattctccatatttttctcctccttccttcagagaaaactctttccccaaaatgccaggactattttttccctttttaaagatgggtgatttttaaatggaaaaattttacatcaagtgtgtaacagcttagctgcactcagtgccactttgagaaaaagaagaaaatcatgcagtgtaagttctctgattcagataccatagtacagcctttcactggatagaaacatgcaggtataagttggatattttctagaaaaaagtattttctttttggatctgaaaagaaatgagccaaaagttttatgttctagatgggcaatgataggccatctgagcaagagatctgagcacttatctcccattctttgattttttttctccccataaacaaagcactgccatacctggagtatatccctcaccattcctcccatacaatgagcacctgcccaaccaacactgtactcatggatagaaatacaactggagggtgacaagggcaatttctgcagagctatggttttataaaacaccttcaggagaaaagagaaaaaaaggtattgaaaaagaatggaatagtagagagtagaagagcaccttacttaaaaccaatctttggcttccaaacttaagtgtttttagccatataactgctgggtttcagtagcaagaaaactataaaggagaactccactttacaataagcaataggcaaagaggttcttttggtgatttctaaatcaagacccagagtttaatgagcagtaagaacctggcacatacaaaaggtgacatcacagacactgttttttccagccaattgctgatgcctaggtcacaatcatcaataattttatcttcacacacaagataacatgagtcatcagataattatatctatgagcattaggataatggtttaaagctctggtccgggagtcagaccatctgaatttgaaacctgactagttacgtgactttgaactgtttttttttttttttttttttaactgtctaagcctaaactttcttatctgtaaagtgggaatgctactacatacctgatgtgtaacatacagattaaatgaaagaattcattaaatgtgcttagcacttttatagctattattagaattagtattagaattagaattattagaattagtataccaagacagtggtattgatttttttattttttttttgagacagggtctcgctctgttacccaggttggagattggtggtgtgatctaggctctctgcagcctcgatctcctgggctcaagtgatcctctgacctcagcctccctaatagctaggactataggcatgcgccaccacacctggctaacttttgtattttttgcaaagacggggttttgccatgttgcccagactggtctcaaactcctgggctcaagcgatcctcccatcttggcctctcaaagtgctaggattacaaacgtgatgtactgatttttttggtgagggagttccatgacacatcttcaaagacttacttcctttttcaaaagcaggtatcaaagatcttcctgggttaaaacttttgttgatattgttgttatactagaattttaaattttaccaaataaaataatccctttcgcgtgcatgtgcatgtgtgtgtgtgtgtgtgtgtgtgtgtgtgtgtgtaaacaataaggatctactccaaaaagtcagtaatatgtaatgacagcagtgttttttgcaacgcataccaagttattataaaaaatgcattcttctataagatgatataaacgataacctgcctgctaattgggtttcttacatagaggtcttatctcccagaaggtgaaaatgtcctaaatggatatctcctccatttggtgaaatatccttataacctgcaatccttctcagagacacaaccttgctgtggtcacagaagatgacgcttcagatctaaatatagggtcatggtgctgggagagggggcggagagataataagaatgggggggggtatgtggaggctcaagcactataaataaccaaagaacacgactacatttagaacttcccatgtgtagaattcaagcaaatcttgtgctttgtttcttgaaacaaaagaaacaagagcatcgttcaggtttctgggagcccctggcaggaatatactcttccgtatattttttcttttgaagaactgagaactcaaaataaatcctcgtgatcattttaagatcttctaatccccaaaatgcatccttactacacttagagaatgacctgcccacacaagctgacaatagcttcatgcaaaatagctccctaaacataaaagggtattttggcaaaggcttaacaagcagagtacatatttcagttgcaagtatttctctaacatctccaatatggaagcttcttataatattttagcagaaacaaacatctgttttggggacgacacctgataattttaaccattcctataatgggaaagtgcttactagaggaaatgtttacaaagattctttgtgcagtaaggatggcccaggtgtccataaaaacatctgctcagcaaaagcacaaccaacattgctgaaatctctaggctgtctccattcaaaatgtttctaggctacatgctagagaagagaatcccttagtgagcccacaggagagttatttgcataatccttggttattcacagatatttggtgactaatctgcattcctgtcaaattgaagggggtctacatacccgtggatttgtggcatcccaggagaagtctgggtccataaaccagtgaatgaatcccattaacacatatatgtagcttcttcatctgtgacatcaatgacattttttacttgcctatttctgaatattctttattaaataataaactcaagaataatttcatacaaatcaccagtgtatgtaagtattatttcctgttatttcaatggtttcctcacaggctaaagtatggctccagtttcagaatcacggctgggtttgccagtatggaacccctttatggcaggtgcagcttccaaggctacttttacaaaacctaacccataaaagatcagctggagagaatctgtgaataactatgaacttcaaaacatatttctaagtatcagaggcaggtgtgatagggcaggagattcttttgaacagcctaataaatcacctttcagtttttcccaacaccacaggaaagaacctctggtaaaggaattctttagccagaagatgtgcctttcccaacccacctccacgcactggaagaggtgagccattacaactcggagtagcatgctggaagctttaccctccaatccaggctggagaaggaagaggtagtacaaggtttctccaaatatttcaaaggcaaagttgcttccttcataactaaattccagtaaatggctttatatctccctgtgctggactaatcttccccatctctatatctttgatgttaatggtatgatttttattttcagttaggaagttgctttcccattgggttaaatggaataaaactcacctcttctatattgtgtaagacaatgttggtcaagtcttgcttgaaggccatttgtctgacaccattcatcaactaccataatcttatcatttatggtgggggacagtcaggactgttggtagcaaaactcttagagggtaaatgtattcaaacttttaccttagatttgatccagaagactgaggttggatatgggttggctgccaaggtagatggcatctgccacacagagacagacaaggaattagaaagcaaaaagctaagcaagagtcatacaaatgtataccagtccttgggaattaaaatataggtctcttagacaggacatgaaataggtaaagaccatgacaacttctaaaaccatgatatgggcaaagatagcttgaccacaaagctaaaggagtctaatctttaggtcccctcactacggaagctcttctcaaggccctgtgtacacatagttgtatattttggtgacatttcctatagcaagatattttaaccacagttgatctctggctttccctccacatgtctcttgggttgggtgacccaggaatgatcccagacattcctggtatttggcaaaggaacagctgagttgtcaatatatttattttgggtttcatagtttatatttaggtggctcacaatcacatatacttaaattattgttagttattcccgtgtaggaataacttgtaggaacgcttctaccactccatccactctgtacaggtaccatgtctgagaatgcagattcagaaattgtatagagacgtaaacatgtggcctggctccaaaccaatgggtcatagatgagagaaggtttgaggccggcatggtggctcatgcctctaatcccagcactttgggaggcgaaggtgggcagatctcttgaggccaggagtcaaccagcctgagaaacatagagaaacctcgtctctgtaaaataataataataataataatacaaaaatcagcctggagtggcggggcatggctgtggtcccagctactcgggaggctgaggctggaggatcgcttgagcccgaggggcagagattgcagtgagccaatatcacacgactgtactccagcctgggcaatagagagagactctgcctcaaaataaataaataaaatgaactaaaagaagaaaaagggcttgaaatgcatagacctagtctggaaaattcttctaaatctcccagctcatatatgaaagaagcttgaatagagtttttccaaaaattcgacaacaatcctaaaaatttacataatgttgccaataatgagtagtgtaactaaaagaagacattttaaaccatcaataataagaaacaaatttcagtcaacatgctagagaaaagactaaattttctttctattctctctatagaaaatgacattacaaaatctttgttgtcaaagaagaggcaatcgaagagcatgtagccaaaaaatacagaaaagatattttacagaggagtgccagacagttcattagaattttgttatttttctggattttttaaaagttgtgatatttgtaagctttgttacatttaaaatttgtcatgattttctttcccattctgaacaaatattcacttttgcacctaattttgcatttttagtttgatatcctttctctaacatagctgtgcttaaggaaaaagagcatgcttccatgcatgactcagtttaaagaaaagccatcaacctatgaaggaatacaatgctagtggcaccagggactccaaggggagaacagtcattgctgctgcctggttcagcttccctctcctgcttagaaatgtctttctcatactgaacgtttgggatgtctgaatgtgtgtgtactttaaagagggatgtgatgataccattacaatcctacttcctctttgaggtgaaatcaaatttcaggggaagaagacaaatgaagggatacagagagttttatctctattctgtagaagagtttggttaagagtttgatgaagtactcatttcctttctaccactgtctaccctatgagcttaagtccaggacaggcactccctgggaacagcaggagttgccagtgccccactcccatcccttcttccttaccaagttagtgaaggctggcttatctgccatcacctaaaacttttttgctcaaaggcattctctggccactatgatggtttgcctatctgcttgcatggcagcagagctgtaccagggaattgatccctcacccaagctctaaccaatgatcgacagaagagttagtatacaaatattccatctttttcaccctttggtggcatcactctaaaacttcccagagtttcccagcaagactgaactccagttatccacagtggtaacttaataacaaaaccttttattggctgcctttccttctctgtcttatttccttatttttctactctgatcacctcccagataaactatatgcccctgaatctttgtcttggagtctgttcctgcagaaactcaaaataaggtgttgctttattgaagccttattagagaaaacacaattggaagaaagtaaaggtacatctagagttgcataattcctattactttacttattatcatcaagtccagaagccatatatggccaacagcatgattgctttctggttaccctgaatgtgacatttgagggtgagaaattacttaccatcaggatttaggtattccattatcactgtagaaactttttggattacctgtaaaagactatttttgatctcccatacttatcagttgttttccttattgtaattttcaaccctcaatgtatgttgcttgtgaacacaggaactcagcagcaaaactcactgcctccctcttcctagctgctacatgggtctccttcaggttccctgtccaactagctcttggctgtggactcattcttaatttctgtccttctgtttgagaaccccaaccctcagatttactgggttctgatatggtggcttgaatattcaatccatacttagttcctctttaggggtagctacttgagcttgataataccatatttgtatatttccctggcttagattctggtacttgaaggtaaaactcttgaaggagttattctagatatcttcctagatgattcatgcctttcagacagcagcaatggacacttctgggctttcttctcctttaaccttagtcatttaccacagccccaaggagaatgtctattatgacgttcagacaaaactgaatgaaaaataagtgtgcctaaagaaaatgaaagggcctcatgttttgaagtacttcaagttttccagtccactaaaatggatgagagttaaccacagtcatagccctttaattgggattacaacaatcacacttccaccatgagacttgaaaggcagatgctggagatagagcctttcttgcccacacaactataagtgcctattgtttgtatctaatgacctgtctgaatattctagagtgggtaatttttcatacatcaaaactcaacaccagatatcggtgtctttttatttaaaaagggagatttgggtggctcacatatgaaatcccagcactttgggaggctgaggcgggtggattgtttgagccccagagattaagactagcctgggcaacatgataaaaccccatctccatctctaaaaaaatacaaaaattagccagtcatggtggcacgtacctgtagtcccagctactcaggaggctgaagtgaaacaattgagctgcagtgagccgtgatgttgccactgcactctgtctgcatggtagagactctgtctcaaaaaaaaaaaaaaaaaaaaaaacacagtgggagtgatttataaatttatctaatgtatcaagttttctccagttgaaatcatcaaccaataggtgaaaataggctttcgaggattccatcaatcaaaaaacccaaccccaatttttgatagcatggatgtacatgtgtgtatttaaatatagccccaaatttccttcatgcaatttcctattctgatacatacttattattcacctacgtcaatcagctcagtgatggcttacactttccttcatattcagagaaaaagtgtgtccctgcagcttcctttttccaggcaatatgacttggtttccatgggcttctacctatggcttagcaataggtatttacaaggcactttccactggaaagtcctggtgagaagaaagttcttctgtatcactagttgttggtatgtttcaatgagtttctaactttactttctaaaatgagtggcttggctttagtctaaatgaacagtgtgcatgggggaggagacagagaaagataacctgagctttttataatgtgtcttagctgagatgtggacggttaacaaggtacataatgatctacagaaacactgagaaattctccgttatacccaacaattctttagagtcaaaaaaaaattgtctgaactcacaaaggaatgtcaccagaaatttgtccaatatggttctactcttgggtcaaaccattcagattttcacagtggtgtcagtgaagggatggcatgacaggcaaagataacatttctagaaaaatggatgctgatcaatgtgtaacccaaccctaaaaaatggatgttttccaaactgaaccaatgagtcctattgttaaagttgaataacagcactacttatccaaatttcaaaaatatttttttaaagtaaaaagcatataactttaaaaataatcaatgcaaacaacgttttagcctcatttatatatattttttaaacatttggtgcatagtacctttttgtatcctaaagtttagcaaaaagagttaaagagttaatttcatatagtgttgacccttgaacaacatgggcttaaactatgtgggtccacttgtatgcggattttctcccatcttggccacccctgagacagcaaaaccaattcctcctcttcctcctcctcagcctactcaatgtgaagatgacaggagtcatgacctttatgataatctccttccacttaactaatagtaaatatattttctcttccttatggttttcttaataacattttcttttctctatcttactttattgtaaggatacagtatataacacatataacatacaaaatatgtgttgaaccatgtttattttaaagtttctggtcaacagtaggctgttagtagttaagtttagaggagtcaaaaagttataagtggattttcaactctgcattgttctagggtcaattgtactgtattgctatttcctgtggtcctataaagcaggggtccccaactgccccccaaccccaccccatatacatccatggcctgttaggaaactggttgcatagcaggaggtgagtgacagggaggcgagcactaccatctgagctctgcctcctgtcagatcagcagtggcattagattctcatagaagcatgaaccctattatgaattgttcatgcaagggatctagtttgcgtgctccttatgagaattgaagtaatgcctgatgatctgaggtaaaacagtttcatcccaaaaccatcccccacccatccatggaaaaattatcttccacaaaacctgtttccggcgccaaaaaggttggggactgttgctataaagagcactaatactgtaccattgaaaccaacatagaatccttgctctgatgtcacaggatttttcctgtcctcagccaacgtctaggtaatcccaagcgttttgttgttgctgctgctgctgctgttatcatccatcattgctaaaacttattaactcggcatatattcattgggagcctactctgggccaagcactggatgaacagacgaacaagataaagtgtccactctcatgaggtttacacatctgatgggggaaatagctaattgataagtaaatatattcccattagagaactgcagaataggataggctgggatgggatagcatgggatgggatgggataggatgggatgggatgggatgggatgggatgggatgggatgggatgggatgggatgggatgggatgggatgggatagaatattccttgaagaacaagaaacaggaaagggaggtagagtgtgataagccatggctatgttagagaaggttagaataggcctctgaatccaagccatgtttggtcccaatgtaaactatacattctgcaaataagcatgaattctccctagaaagaaatttccaggcgtgttttatttgtgccactaaatgtgcaacatatgtatgtgtgtctgttgtaaatcactttgcccaagttccacttcattccatcttgggatactcctgggctgtgatttttcatccctaacctttaccagacagtgtgtgatacgctgctttcagaggccaaaaaataatagggggttgccaagttgattttggattcccatgcagtctggatttttcagaccaaatgaattggttggacctacataacctcaattaagatgggaatgggggcttcaccttgatcacacatcctaaaccacacacagtgcttaagcttccaagctgtcagtctttgtgactccccttcagtgatatttaactacttatgacatgagattttgaaagctttttgaaagtcttattcactaatggagaagcctcttacatattttataaaactaaacaaacatcaaagttaacactcaaatgcaacctgttcttaaactctcagagccttgtcaggatctgaatccctcctgcaagttctattaaaacaaacagtgcaagagtcttgaattattagagataaaatcagattataagcttcctgagggcaaagattttattttacattgttttgttcctcagtacccagcatagtgcctgacataaagtaaatgatcaaaaaatgtttgtttaattgtattaatgggggagaaagttgtaagatatttaaccacacaaaacactcagcttttgttacttttcctttaaacattattagatatctccaaagttaaactgtgactgaaaataaaaattatttgtaaacatagatatcaaattccaatattggtttgaagcaaaccaaactccctataatactttacagattcccaaaatttacaaagctcatgcaggcttaatgtataccattattatcaaagaatatgatgacagtgattataacaatagttaccattaattaagtgctaaccatggtgccagatgcctcattatgtccttccgtctttgttcagcaagtcactacacaatgtcacctcccacatcaaagaggcttcctataatcaccatctaaaatatcacctccatttgatccctctcactcctcaccttgttttatcatccacccactgatatatttgtttcaattgtttactaggtttagctctaccaacccgaatgtaagtttcaaaaaagtaggagctctaacttcattgtttactcttagatctttagcaattagtagaaattcaacaagtagttgatgaatgaatgaatgaatgagttattttattcacactttaaaacaactctgcaaagtagtatatttagccacaagaaattgaacctacatttctctaagtctcatactcttcctggtacctcatgcaaacatgtgttgaataaacaaaaaggtgagagaaagccctcctccctcaccatctccctccttctcctacctttctatggcacaactgaaatctccacttctcacttcacttgcctattttcaggaaacacaatgagcaaaattcacacatattaatcattttccatgctacttttatataacttatatgcaacccaagaagaaaaagttatatcatttggagtttgggagcagagacagttggatttaagaaccatctctgagtcacctgaagcatccctgcagtgtgaaaaaagcctaaggcagagaccggaatcagatacctccattactttgaactcacccggagatgatgagggcagatccaaggttaaggtgacagatattcccgtaccgcagtcttgcccatttatatccaagaccctccacctctgaggtaccctgttgaatgactcactcctggctaggtttgtggctcaaaaaatattgggtagagattgcgctcactctggctcctgttccacaatgatctcactccagctcctggtccataatgatgaggttctgcctgaattatagcctatagcagattttcagttacttctttcagaaaaatggacttttatcttccttatacttcaaattttatctccaggtaaatatcactttttctctaatacatttttatttcatgaatatgatggatgaaaacaggagccaatgttttaattgctctaataaaatgaatcatctctttcattctcgttttactccttgcaaagactttttaaaaaatctgtaagtgcatttctgagagttcttaaatgtaagcatatctctgagcttgctaactacattttccatagtaggttatttaaaatgtatctttaaagtagattacatgtctcaggggactggtaatgggctatagagtcactcactttgaagccaccagttcaaattttgtctagacattaagcagcgaaaaaaaatcatttcaactgacaattgtttggcttacttttgtggaagatgagttagtagctcctctccagtcccaggtatgcattttacaaataccaaccatcatcttggaggcattaaaggagaccctcccagtgatggggcacccggaaggggtgttgtctgcacaaacacacacacggatacatgtgactgcacacacatataaacccatgtgtgtaaacacacacacacacacacacatcctggtacaactactttgtgcttatccataagagacggtaaaaaagtatatattggccttgtatttgacaacactcaattcagtcctaaccgttcgacaacttctttttttttcttgagactcctctctgtatcgcccaggctggagtgcagtggcgctatgtcggctcactgcaagctccatctccagggttcacgccattctcctgcctcagcctccggagtagctgggactacaggtgcccaccaccacgcccggctaattttttgtattttttttttagtagagacgggctttcactgtgttaccgggatggtctcgatctcctgacctcgtgatccacccacctcggcctctcaaagtgctgggattacaggtgtgagccaccgtgcccggccccgtccaacaacttctaaatttgcctacaaccctcagtgatcctgctcttgctgtgcagatttctgcacacagatgagagcaccttcataagccagctttgctgtttactgtgatgaaacagaagatggcattcgtcttcagggatgtcaatctggaagcttttaggaacactagcctgcacttaaagatcaaagacgactgagatgactcttctgaaatagaacctttcctcaggactcaggagaccaaaggccattcttgacccctgcccctccttcatctcttgcatccaatacatatgcatgccctgttcttctattctctttatataccctgaattcatcacttatttgcattatcaccaccttagggaaggccactgtcatctctcaccctgatgactgaaacgacttcctcactgtccgttgcctatctgtggttttcctccattcattctccatgatactaccagagtgtctctccaaaatgtcactcctctgcttaaaacccttcagtggctctccattgccttcaggatgaggtccctaatccttagcttagccaataagatttttaggatttcacccctgtgggctccttcattgtcattcctgtaagaagcatgcttccaatggctaggcatgaattgccactttctaccgcttccctagttactgttaaatgatccttcttgactcaacctagctgtcatttcttccagagggtatcctgatccttccaaattctaggttgggtgttattcttatagccctatcatttcactttccacctatactagaatctccttcaggcagaatctgaatcttattcactgtcaagtccctggttagtaatatctagattgtaataatatgaataaataaatgaggtcagaattttaagaattgcttacaccatttcctctatctcctgactacattttgtcctattctttttgttctatcataaaccaacttgtgtcctgatcccattctagtgttttctttcttgccattcactcctatgcacataaagaacaggacagcagaaatgaagagtgagctgtaatctccactcaattccaggattcaaaatgtgggttacaaaggaaaatcaagtaataacctttgtagaagggcttttattaacaaaaaaaaaattaagggcagtttatccccttgctaaaagagttttaggcatgatcctacctgaagataatgaaatagattggatcagtgattgctataaacaaatctgagtgcagatttaaaatgagggggaatagtctaggataatttctttcatgactgtgtctctgcttctttggactttacagagaaggcaaagaggaaaaagaggaggaagagttagataagatgatatgttacattttaaaaggagagtataaaaagtgtacatgcagaggactggaagtagaaatggtaagtactaaaggaaaacaaggaatggaaatgggaaaaatggatagggtaaggggatgagaggaggaaaaacagagaagaagataggtaacagtatagataaatcagaggagaaaaaaagtgaaaaataacaggcaaaaagaaggaaagggagaaatggaatatagtaatttatgcatactgggggccttattttgaaagttaaataagtaaatgaataagttaaggtgagaaataaaggtgagaaagagtcaaggagtagccaaaaaaggtaaaaatatttacaatctgattctagtctaccacgttgtatattcataatactgtatgcattatactcaaaaagtgctgagtcctcccctaatcctgtcaatggagagcaaaacactattatagcaatatgaagaataatctgaatgctaatatcattcattcattcattcagccaatattcactaaacactctcagtgggccagcagacactacattaggtgttaagaatttgactgtaagacacacaacctatggccccaatgagactgcaaaagaaagcattaaatatcttttgcaagttggaaagaatcttttactttatattgcacaggctacataatctgtgaaaaaaaatcaaaatcaaaagtaatagtatgtcttggccaaaagccacaggaaacgggcatttttctcaatagaattagatgacattatgacatgtgcccatttagaatggaactgcaaatcataaaaatgccaaaaacgtggagaagaaaaacattaaaggagctaacagtagaatattaaagacagacataattaaagagagaaaggcataataaatacagggtactttaaattctctttgtcatagggctgtactgcagtttgactcccagtcccattaaagtcattctaaattgattccctcggtataatgagcccctcttgataacaccaaaacacttggcctctcaagagctccttaaagacaaccctgcagaacatgccgctagcaggatattcctgcaaggaactagcagccacttcatttagcagcctggcatgcagtgaaacagaccaatgtctggcttttcctccccagatgtacagaaaaagaatgaacagcttccctttgcccatgagggaggcctttaaggtacatattgcaggaacatggttctactgagtccccaacctttgatgtttcctggttatgactgtcttagactttgagttgttacattatagattctctgtaacaaagtctctttactattttacatttgggctacaaattttagcttcctacttaatttgcataaagagagaatttacaaaatttcccactgaggtcatctttcctaaatacttttgctattctatacggaaaagcgtttaaaatagggacagaggattccaaatacattttataatgaacactattctcttccaccatacaatgctagcaaatataaggaacagacaagtcactgggacatccaaggaacccaaattattacattaccattttcctggaccccattaaccttgagagaactgtaaaggtcattagtttgcatggctaaatcgctttcagcaatttctgtaaaaatgtacaaacaataactctttcacccatgctcaggaattttttttcttcccttttttaactgtgaaagatatttgcatgaaaacaggatctttgtttcctaaggattgatccacttgctacttactactgcttcttctgcaccttggtgacatcatagctctggctaaggagctaattttaaaatcacaaaggattgtgatttcaagtagaagcagctaacctcttgtgaaacaaagaccctgttttcaagccattgtttctgataataaaatgcaagaaacactaaacacctaaaatgtcaaatagatgttttatctgaaaatagatattaacattgtctatgattctctacttcttaaagctccaggaaaaaattagacaaatagacaaaagaaactaaaaatgaaattttgaatgttaacaacattctttctctacacctttgccagtgttgtttgcctacaaacattggacaatcatattatcattgtattataccatcctcatttcatggagtgatagcaatctaaaaataggctttgaagatggcatgatggcatattttatctagacattacttcttttttgcaaatataaatccacttataatattgttatcatttaattatccctacataatttagcattttgcttacattttgttatttctgttatcacaattaagaactggttttcagtgattttaatctcagcaatgtgcatatatgaggataaccctaattgctatttataagagataattagaaatattccttcacacagcgtgaaataaaattctatatctcataaattccaaggtattggacaagtaagaagaatataaatggatttataacacatttcaacaaatttatacaatttataaaatcttatgacaaaattataaatggccattgagagcacctaggtgatgtccaccctttgaatgagatttcagaaaagataatgaaacatggacattcacatttgcgtggttcatataacccatgaaccataggctggagttagtgtgccacttctactgcatactactgaggtaatcacacacagcatggtcctatttcttgtgattatttgtgactctcctgggcctgagtacaataatatgtcagaaaagagaatgctgtggatcagtggcttgggtgaactatttagttttgccctctctggaccacagactgcatgcccagccccaattacctgaatctgtatgcccagttcttgtgttaaaggaggactaggggaagacaagagctgaaactgggttcacatcttatcattatttttacaaagccaactcacatgtacctgccacagtggcagcacagtctaggtgtatgtaaagatattgttgttatgggtactatccataaggatacttaaatcaaaagagccactctttatcaagcacatacatgctaggaactgtgctcaatacattacatacattatctcatatttacaaaatattttcaaggtattttttctctgttatggagaggatgtgattgagacttggaggagttaatcagaccaactttacacagctgctatggatacactgggattcaagcccatcccaggtctatcggactccaaatttctcatttttcttcctagttcaagaggtatgtgacatggatttaaaaaactaaaaaagatccagtattttaccaacaccctggctgaaaaatctgtagattcgcttgttcgttcagcaaacattggttgagtagttactctgtgatgattcatagtttgtgagaagaaatgtatttttgtttttgtttttgctttttaaaaaagggtggtttagaatctcagattgattctgagataaactgataagcctccttcttagcttctgtgttctgaccatggcaaaccactcaacccttgcatcttcaatgtgaaaagattagacatgactattcccatgtttgtttctaaaaggggaaactctttatgcttctgttccaattctcaaacagtatctactattattctgtagcagatacaccagtatcaagctattgttaattaataagcattccatggaaatgtgggctaaacagtgacttcattaaaagagcataatctatttcatacatctttgcttatccccaagattttttacatgtaaaatgtactaagtggagtgctatgttttcatctgaatgctgcttaatgcttgccttattatacgtaagcgaacagttattgtattagtttgctagggctgccataataaagtaccacaaaccagtggcttaaaaaacagaaatttgtctcacagttctggaggctagaagtctgaaatcaagatgtcagcagggttgattccttttgtaggctatgacggagactctgttccatgaatctgtgctagcttttagcagcttgccagcgatctttggagttccttggcttatggcagcataattccaatctttatgtggcattctccccttgtccctgtgtccaaattgtctccttttataaggacataagatatattgaactagggcccaatcaaatgatttcatcttaacttgatcttctgcaaagaccctacttccgtaaaaggctatattgtaaggtatagggaggtggtcaggacttcaacatcttttggggatacacaattcaacccacaacggtgatcctatataaagcttgatttctttagatgtttcataaattttaagctcagatgtctccttgttgcactaactccaagtgaaggaccgtgtagcaacatcgtcactggaaacccacagaaaaaagacaagacacagcttcatgttagaaagggcaggcattcagcaaagcattggtcccatgcagcaagggcctatgcactctgtgtgtgttccatagacttccatgccaattgaaactccagctatccacactatgcacatgttaaagacagatacacttttccattcaatcagggacaatgccgttcaccggcaccaaaatgaaccatgctgtcatgtaggatggtggcctcaatgagatacatcttgatttaatggagaaataaaagtgatataagatcataagctaagaccatcataaagtgcatgcaagcaccctatactttaatactcccaagctgctttttaactctgagtgaaaaaatttgtctaatgtctacagaaatggttcaactaatttcttcctttaagtaatatcaacctgtctactataatacaccttagtggaagctgccttcttttcttcggttcttttttttatgctggaactctgtaaagatataggaatggacacagtgcttatttctgaatgacaggaactctcccacagaaataaagcaaatccacacttgattaccgtctttacagaccctttgcaagcaccagagtctgaaaatgagtcacgtggatgataccaaactgccttgggcagtaaaaagcagccgcagcttttccctactcttccattaataattccttcattcaatcacacacaatttttgaacacatattctgtctcatgttcactgttttaggtttaaatagggtagtggatatagacctcattgaaaatgtaacacttgagaaaagacttaaattacaaaaggcgttgatcatgaaatatatataaagaatatttcaagtagaggaaacagccaatgcaaaaaccctaagataacggcaagtctggtaagctcaaggaatagcaaagaggccaaggtggctggggcagagacaatgagaggagaggagttagagtggaggtcagggaggaggtaggggccggttcacataaggctttcttggatactacaaagactttgacttttactgaaggaaatggagaaccataccagcattttgaacagagagaatgaccagacttttgttttaaaatctctttaccttaaaagtcatttgtacatcaaaagtgaaaggccaagaattgatagcttaagccagttcagcacatggaaatggaccttcacaatcccagctcaaatctccaactgctaataagtttggcaccattataattttttttttaaagaaaggagcacccgggcatgatggctcacacctgtaatcccagcactttgggaggccgagtctggtggatcacttgaggccagaaatttgagaccagcctggtcaacacggcgaaaccccatctctactaaaaatacaaaaattagctgggcatggtggtacatatctgtaattccagctaccctggtggctgagccacgagaatctcttgaacccaggaggcagagctggcagtgagccgagatagtgccactgcactccagcctgggcatcagagtgagattctgtctaaaaaaaaaaaaaagaaagaaagaaaaaaaaaaaagaaagaaagaaaagaaaagaaagaaacagagattatgcacattgtataatatttattttagggcagatccgtccctaaagttatatgggcttagattttattccctactcattaaaattaaggagttgattctgacagttatctataaaattacacatatacagtatattaatactgtaggaatcagccttcatggtcatctaggatgatctttgcccctgatattcacatctttacagtgaataaacagtaaatcacagctggccagtatgaccaatacaatatggcagaagtgatggtgtgtgactttcaaggctaggtcataaaaggcattatagcttttaccttgttctcttgaatcacttgctctaggagaaacagccattgtgccataaggagagggacacatggagaggaaccaatttgccagccatatgagcaagtcaccttggaagtggaacctccagccccacgcaggctttcatttgactgcagctccagccaacaactggtgactgcaaccccctggtgacatgcagccccatgagtgaccatgagccagaattgcccaaccaagctgcttctaaatttccaatcaacagaaatcatgataaataaagtcctcagtattattttaagccatgaaagcttttgttactcaagcgcagataactgttatattccaaataatctgtacagtgatcatcagttagctactgttcaaaacatttacttttgtgagatatgcttttgaatttctgaactcaactaaacatttagtaataagatcacagccagataaaactacatcaggaagttgcaaaaaaaaatctttcatttgactgatattacattgaaaaagtactggtttgaagtgatataatgttggagaaagcatggactttgaagtcagaaaaaagtggatatgaataatggccatacttaatagcttgagcaaattacttaaactaatcaagtctcagtttctcaacctataaaacagggaaaataatacttagcttacactgttgagaaaattaagtgagataatatgaaaaaataattttattcaataaacattagtttcccttttcttaaaatgaatctgggccacgtttgttttgtaaagacaaatactctaaaaataataatttaatgtattatgtaagctttatttgcttgtctcatggctaatattaatactaatattaggcttgaaatattagtattaatactaattaataagtattaatattaattaatattaatattaatactaacataaggcctaatattgagctaaccaaactcaagagtatttacaatcagtaattcatttgttattggccactgaaatggcatttacattttggaaacaggaaataactaaataaacacattgcccaatcagattacccataatatttgtgtgacttctaagactaggtcagatatgagacttattttcagtctgttgtttttcatcataaatgtaatttcaatgtccagatgacatatgggtacatacatggatggaccaaaaaaataaaaaaaaaagaagtcatcattaattcaatagcacaattaactgagtttgtgacctcaaatttggaaatatggtttgattcacaatgaatattcataattatcttattaatcataatctcataaataaataacatactgtcttatggggtaaaggggagcgagaagttaccagaatcttgatcccaatatctacaatattcaccaatgcatagactgtgttattaaacaatgtttacatttctacaacgtaaaattgacagacgatgaagtatattttcccagttcttttacttatcctgcctgttttcacaagttttagagaggactttaaaagaaagaagaatggattactgactgatatggtttggctgtgtccccacccaaatctcaccttgaattgtaataatacccaggtgtcaagggcagggccaggtggagataattgaatcatggggatggtttccccaaaactgttctagtggtagtgaataagtctcaggagagctgatggttttataaatgggagttcccctgcacaagctcttttgcctaccaccatgtaagacatgcccttgcttctcctttgccttctgccatgattgaggcctccccagccgtgtagtactgtcagtccattaaatctctttcccttataaattacccaatatccagtatgtctttattagcgtgaaaactaactaatatactgaccaacaatgaagtaaacagtacccaacccaaggttccccccaaatatggtaagccatgggcatataatctaattatttgaaagaaaacagattgtgctggttaagaaattaatctgtataactatatcaatcaattaatttattctgaaaatatgtattctcatgaatgatgctgcttgacacattatatatatagtgcctgtgaaatgagaatgatattattttggaatctagctgccatgataaatggtatatcactttgaaatcacgggactaaaaatagtaaaagggactttggactttttactaccaaggacacttgataccttttagtggtttcccccatgagtcatattgttttgtttttgacaatcaaactgcatttagttagtaataatggttctactcttattaataaaaagctatttattgccgatcagaatttgtgatttgcacaagataactcagtgttgtcaaaaagggagaggtgagtttatatcagccaaaccaagaccaaaaccaaagagatgtcttagttagcttgtgtatattgtgattttatgtcttattttcattagacttttttaaatactgaaagtgagtctttcccctattacttcctccaaggattctaaatgagaagaactattcaggtccaaccacctcctttgaaggacaatcatgaccagagcggtagatgattagtccaagcacacagctaaatagtggcataagctggacagtaaattacatattaaaacaaagactggtgccttttctccactgcgctaaaatgattggaggtttgcccatgacaactaccagctcaataagccaaatcaataaaaatttcaatcacaactgttgcttggcatacacagataagccctctaaaagaacagggaactcttagacacttaggataatgctaaacagataggacaactaatagaaggacttgttatgtaatgttctccctctcaaagtgtcagagtcaaccaaagaggtagttctgctgtttattgtgttttaactccaaagataacctcacatttacaataccataaattctccctaacaatgttgtataataacattagcattggttcttaaatggttcttctgaccattaggaaaaaaatttttaatagtaggtctaaaaccatagctttctatgtcaaaattctctcttctttttttctaagcattttaaagtcaagtagcctatacaaatttataggaaaagtgctttcgcttacttttaatgtgtcaacttcagagccagtcttcattactatgttaatcactgtggtctttattaatggatattttatcccaactatgtaacaacttacttacagtagaacaataactaataattagggacagaattggttcactcttgaaacctagagactaatgattaactaacacaactgagtccagtttgaattggaatggctttgaactcatagaatggctttgaactcatagaatttgaacttatagaatgagtccttttggcttattatcagacttcttgtgtattctacaatacagtgtagaaaaataaacatacactcaatgttcaacataagttatgctaagaatgaatttataaatcacttaaaaatgttaaaaagtaaaatgtaactgaataatatgatgattaggtaatataaagacccatagtctttatttaatattattggtgttaggcttatctgagtaatcaacatatacaactttaattctacaaataacaccatcaataatttggattagtaatcttaagttatgtctatatagtagtacacaatatactacaatatacatataacttcaataagtctcacaggctgtgtggagccaacattgcactacagttacgttggaactggcttaataacaaagattaattttaactataggttgagtatcccttttccaaaatgcctgggaccagaagtgttttcgattttggatgtttttgaatttggaaatatttgcatatacatagtgagatatcgtgagaatgggactcaagtctaaacacaaaattcatttatgtttctaatataccttatatgcacggcctaaaggtaattttatacaatattttaaattattttgcaagaaacaaagttttaactgtgctttgactgaaacccattacatgaggtcaggtgtaaattttccacttgtggtgtcatgttggccctcaaaatgtttcagattttggagcattttggatttgggattttcagattaggcatgctccacctgtatttagtaaactgaactgtggtcaaagtaattttttagctgctgtgctgttttatttattgccatcagcgataaaggctagcttccccataagtactttataaatcatatcaccagtttaaggcttataaaaactattttaattctatgtgatttaatgctttcaataatccatcaggatttttctttagatctttaaaaggactgtaaggagttcagagatgatagagattaaatttacaggatactcacaatgagagcaaaaggaatatttcatcaccccatatacatgtacatacagcattctaatgtagtagattgttttactatcccaaagcattaagatgtgaatgtgacttctcaattttcctgaaaattatgtgggtcaagggggagagggccagtgccaacaccatcaccatatggttccaggctaaaattttaaaatattttcccatacttctatgttattgctaactcaacaattttagtctcttcttccaaagggggaaaaggggaaggaaagaaacactaagtcaatgacattttcataacaaactttgaaacactgttatggtgctgttggataattcaaggacattatcctcaccctcagctcaatgtctaaaaatacttgcaacgattattgtcaaaaaccatttatgacttcctttggaggataagagaataataaacttcagtcttgtaaatatcattatcagaacagtctccataaaattcttctccttcctttcttattcttaagctatttattttgatgaaactgagctttctaaacctatcaaagaagattttacttggaccgactgacttccttcctccttccatcttttcttcctcccttccctcttttcttctgatgcttattcactatatatggactaagcatttactatatgccaaacactgttctaggtgctagacagtcaaaggcaaataaggggggaaaaatcccaagccaattatggaattgaggtggaagcaggtgcagggggaggaaagagcattaagagatgagtccaagagaagagccataatacaaacaagaagaatgatctatcaaagggatccacagacatcagatcttctgcacagtgtgtctagtctcacattatagtcttacatttcatctgctatgctcaaatgtatcctaaagtagaactaggcaattaagataaaccaacagctacaacaacagaaactttaaacccagtgcagcagacattaaaatcttcaccactgcaaaccatttacaccttttaattcctttcaggctgtctgccactgtgagatatgggcaacgtaactattattctccccattttacagatgagtaacttgattcttagcaaaaggattgttcaaggttacaaagctcagtagcagaactaagatctggaacatagacctctgattgcaaatgcagagctttttccatacattatttctccacagtcagaatatatgctcaacgaaagtataatctagcaactgaattcaaaccctggactccagtgactgctctagaatatctacataatggaatattagaaggcaaccagtagggaaagatttccttgaagtggcataggcaacatactacatttacttagattgtttgcactctctaggttctaggctggtgttgctagtgactgtgagaactcttggagtagagagaagagcagagaagacacatattgataatgaattaaaccccaagggcaacacagatatctgtgacaagttgccatgtaaagcagcatcccaacttctactacaagaaatcttaaaggttttattttattaatcagggacagtggctcttgatataccacttaagtccacacctgcagggttttgcactgtgattgagttgaaacaaattccacttgcttctgtggtaaagagacctagttaaatagactagcattccccaactaactgctagctaaatgaacgtcttcccaccaaaaaccaggtatattctgcagggcttagaaactgaagaaacaccatcttgagactttaatcagagattttagtggccagatttcaagatcacctgatgtgatcatatttgaggggattatttttgtatatgtccagaaatttatttggaagcagtgaaaatattctcattcttcatggtaaaaaatattttacagctcaatatgtcacattcacttgcatctccgtaatttcaccttgcttccttgttactaaaatgcttcctgctcaagtcaatctgatccatctaaatgctacatgcttgaaaccaggtattacccccttaccgctctcacagcacccagcacaatgcagggcccacagcgggatctatatattggtcgacttatttttttaatgcacaatattgaagattgctctttaaaattcattccataggatggtagataatgtacatttttgctgagacttgcctacaagggatgccacacctttaagggatcagatcactggctttgaggcttaaagctctcaattccaaaagacacagagggacagcccaagtcattcaaataagctcacgattttatttcatttgaaaagtaaacaatcataaacaattaaaatggcaagctataaaacaagcataaaacttcccattgttccatgatgtgcagctactacattagcttcattgtctattgttcatggtgtttggcaagaatgctttaggcctgaaagtttgcttaaggaacactgggagtgccagacctctacatccatgtctcccatgagcatatcccattgagtatagtttcctttttctttttctttttttttttttttttttttgagatggagtcttgctgtgtcacccaggctggagtgcagtggcacagtcttggctcactgcaacctctgcctcctgggttcaaatgattctcctgcctcagcctcccaagtagctgagattacaggtgcctgccaccgtatctggctaatttttgtatttttagtagagacggggtttcaccatcttggccaggctggtctcaaactcatgacctcataatccacccacctcggcctcccaaagtgctgggattacaagtgtgagccaccgcgcccggcctgagtatagttttcaaattttaaattgctctaacttacactcagagcataaacattagactagccatgggcacttttttattgatggagtacaatacgaagagatttcactgtagggggaaacatcagcaaatcagaagtgcagagatgatcccagccagtccaaaatgagaggggcagatgtagtcattaacacaatttctgatgaataaacataccctcttgcattattttgctgtttgcctgttcttcatgctgtgtctctttggcaaaagagagccaatttctgggtctgaaaatgactgttaatcacatttttaaaaacatattttagcaaaggatgaaaacactcacaaatgcagctgaaatttttaaagagaaagagtgaaaagcaaccccacccctgcagccaaaacaactcagtgtgggaacagtgtcatgttgactcatctctgaagaccaactgatttgtaaaatgatcagaaatgaggtggctggctctgattaccattgtgatttgcgggtgtatttatcctttgatagaaaatctgttcaaatgaattctcccacatatatgccatgcatcaagcaatgcgcttgacagtgatcttcataaagaactgagccttgtcagaggttatcttttcattcaaaggtacaaaatgaaagatggagatgtaactccacaccaaatttggccccgtgaaaagaagctatagaatgactatctgaagaggccaagagactttgaataaaacaggcaaagaccaggaaaacaatgaccttgaatggaaaattatgggaaacatgattaaggtagctgtgtgtagaccaggaagctaacgtaggaaaattaagaggatagggaagtttaattctcttctatagaatattagccccttacctccttacccatcccttgagacagattagatcttaaaatgcctttcatctctggtagacaggttgcagcaccaataggctaaaatattcatgggcaacagcctgcaaattccaacaagccacattaactgcttagatatactgacgataccaaggttaccaccaaacgccatcaactcatagtaccatatgatctgcttactatgcaaatgtgtacatatgtgtgaagtctgattattataaataactcatttcccagctgcgtacacactctacagaaaaaatgacacattgcctgactatcactaaaagatgccaagtgaatgtgatttataaaatcagtcttccaaacctgtttctcctgattttaggttctgtggggaacataaaaggaagtcccaagtgaaatgagagttgtctgacattcaataaacaggtttattggtggacactacaatgctagaaaccaaggctggccttccttggagctagtctgagtggtgacttggtaaactgtgaattaagctgaatcattgcactggctctggagggaacagaggctatgagtggctaaatggttgcatactatcccgcttcctctacacattagctaattagttggctgcctacatgcaaagcatttgctagataatctcccaaggaaataaaaaaaacttcactcctcgtttcagtaggtccagtcgagaaactagcctgggattgctttgggattggttttgtcttggagaagacataatgtccacatatgcacaaacacacacctcactgtgggtacctcatatctagttcctaatctaaattctcccagggattcctctgtgatcctgacttcccagcttcaggctgcgattgccttcctcctcttgtggctactctgtccccaggctcaccctctggcccacctcagcctggatgtctagtttcttagtacttacctaatttgaactacttatctctttagccccgagttttgtatacaactttgttttcacttttcttcgtgctagcttgtaccccctctgcaggattacatattcctagaagccccaccatcattgcaatgagggacacattcaggctttgaggtatctgaaatgcatgcaattgaaaagggactctttttaagaagatgagtacacaaatataaatgtaaagtaataagtaaaactttggaggggacccatgaaagtgaggtgacctagagcttgagtttcatccatttcttaataaatctgcctctgatgtggacaccgtcattctagtggattgccattaaaggcttttggcccgtcttctgagaaacccatctatttctacagcacttaggactttttccttgagaatttgagattttaataaaacttgaaagtgtttatgcccataagaggtatgcaatcaatatctgcaaatataaataataaaaatgataagatgtgatcacagggaccccaaactctcaatgcataaaatgtgggaaaaagaagctcatgaatcccacctgttatcttggaaactgctactgctacatacctagcttgatagcatttgaaatagctcctaactagatagtattagaaaacccttgtttcgagttactgatagcaagaaaatgacactgacactggcaatttagaaaaggcaaactcagaggctaagtttaggctaaggaaattacagagtacaagaacacttcttccgtcctttccttccacaggttcctcaagctgcctctccccactggcctcccactttgccctcagtagctacaatttggccagagagttctcaagctaatttcatacacagaccagtgagcaagaatccctgctccttttttttctgagttctttgaatattactgtattatatcctcaggatttctattcatagtttgccctagggctattgtaacaaagtaccacaaactgagtggcttaaaccacagtaatatattatctcagctctacaactcagaagttcaaaatcaaggtgttgataggggtggttccttctgagggttgtgagaaaatgttccaggctcttcttcttggcttacagatggttgtcttctccatgagtttcttcatatcatgtcttccttctatgcatgttgtctctgtgtccaaatttctccttttttataagaggataatcctggattggagctcaccctaattgcatcatttgaacttgattacctctggaaaggctctatccccaaacgggatcacattcctctgtactggaggttaggactccaaaatatctttcttggagtatacaattcaacccataacaaaactataagcagctctctttattagatgctaagaaaaagtatgtgcagctaaggtgaccattagttcactgagcaaagcagatattaccttaggatgtcaaaggggtgtttgaagactgcattacactaatgcaaaaaacagattgagaactaacatgatgttaagtaacaagtataaatttggcaaagaataatgtaaaattgcataacttttgttgttttgcttccatgtccatggacatttgaacaagtaaactcaatacattacagctttttgaaggacagacagtccataatctctgacaatctatagttcctttaaatgcctctctgccagataatttagggctcacagaaaagagaggttaagacctatcacttacccctgaagtgtgacattaggctttaaatgtatttcatctctggataaaagattgtttagtgcttactttttgaagtatacattagcaacacaggacctaaggatggcatgtgagatcattttaattgctagaagggccagtcactattagctaaatgtcatcccccctgaaagagtggccaagcacagtgctccctgactggtaattagaatcttgttacctcctaccattaaaatgaggggctgaaacattagcacaccagagtgaatgaggagggtaaatatgatttgatgatcatgaaaatgaaagccaactattaaagcaagaggaacaagatatgaacggattgcatttagtgcccacctaggtaaataatgctttatcagagcaatgctccaaaaggagtgaagggtgcctatccacccttctttgacttcctgcatctgcttggaggattcctttgacctttgttttttaccccctttccctccttccaaaatttacttttgtgactgctgtgggtgtttgggttcttattttaatttattttaaagtttgatttaaatttggaacctgcataagacttttgacatttatttctgggggtgttttctgaagctggatgaagtgggtgttgactgacagacaggttgctatgggaacagctgtcattgcagagactaaggctttatttcctactcttcttttgtcaggcaaaggtttgtgggatattttaaaaatagtataagtgccccagaattaataggaaattgttcagtgactcttttctaacatacctatcaaaacctgcaatagttttcattctgtactgctctgttctgcatatggattcataacttttttctttaaaacaagtgctttccaatatggctttctctcattggttgtttgctctccacatttcccctatgatactggtcctctataaaatcatacaggtaaggaaatcaaagtaataaaaggcatccaacagtcatcccaaagaaacattcaactagtgtgaccatggacttgggcgacctataagctccatcctggtgctttatttactgggcaacttcttcatcttaggatgttaaagaggaaattcaggagatgagaaaatacatgcaagttaaaagaggagcatataagttatcttagacttaagttgggttcaattatttttatctctattcatttatttattctctacctttagtagcctcttggagatttgagtagatgattaaataagatgcaggagttctacatcaaatcctaatcagccccaaatcttctatttctcaggttgctcattccacagcgattcattacagctcccaaaccaattgaattctgaatacattccaagcatcacttagaaaaatgaccaaaaaaagcagaaaccccattgaacaatctgctctgaaaataaagaagatcaacccttctctaaactcagctttctatgaacccgaatccaatcatctcttttcttgacaacaggtacctccctatactactccacatacccacacagtgcagaaccccatataggttagcttctggatttctgaaaatagtgcaggggctgattgtttgcattattttgtgtttttctggctgcattcaatttctaccatctcttcactggtctttctttgcttccttttacatgaatgtccaattttgcatttgttaagggccatcatccagacactgctggaaaagcaaaatttcaccttaataatgtttcagatgtacactacctaaacaagaattaaactcatagtttagacaaagtaaaatatataaaacataaatttatttccttgaaacttggctcaaactagtatcttttctttcatcattccattggaggaggtttatagggttgtttttctctacacaggagctctaagtgtttatgtcatcctgatacatggaaatttccttaattaactaaaattgtgtactcaatcatattttctcacctcctgaaaatacctatacaagatgcaagagagttgtgaggatcttaattacgtatggcaagcatggtttgatatttcaggaacctcaggttttgtttgtgtggggggtgagagggggcagctagatttttttttttttttgagacagagtttcactcttactgcccagactggagtgcaatggcatgatcttggctcactgcaacctccacctcccaggttcaaatgattctcctgtctcagcctcctgagtatctgggattacaggcgcatgccaccacgcccggctatttttttgtatttttagtagagatggagtttcaccatgttgaccaggctggcttcgaactgctgacctcaggtgatcgagggcggctagatttaaagtgagaaagaaatatgccgagaaagtttgtgtcgatcttaccttccccttcttatggctgatttcaggagtagactggaagggagatcttagaacagagaaaaatgatgaacaaaataaaagaggttaggaaaagaagcgagtgatagtgtgagaataaaattcaattgaagaaaatgttaaaaagtgctgagaatatattatcataatgcagactgagatagtctgcagcttactcatcgcaagtgtaacattatttgtacatttttaataaagccaagtgccatttcctttttttttaagattgtataatggaacagttactaaatttggagtcagatgagctagaatttggctctcatgtgatccgatatgtgatcttgggcaagtaacaatttagttgagaccatctcttcctcagaacaacaccctgcctccctacaacccagaaagcatttagaaaaactgtaaactactctccaaatctaagttattattattgttttcatctttcttctccttctttccttcattctccaacttctactaccagttatcatcatcatcctcatcatcattgtcattatcatcactaggggaaagtatctgggctggaaatcctgttttagcatttgttcccagtagtcacatacttataaatgatttacctacaaattccggaaaagaaccatcaaaagagattttccttatatctcctctatttgactttgctgatcatatctctaaagctaggtgttctgctatattttgctataaatggatccaatttggccaatgacattaaattattaatctggagtaagcaatgagtatttatgtaattcacttgcaaactgtaattgtcaattagaatatccaatgcctatatatctaggcatacgtccatacagtttatcctcatgcaatacaggaaaattgaaaatccaataagtaaactcttttactaagagacataaccgaaaagcctgttgtcactttttaacagactgcaaatcaataagtgatgtagggctttactttttggtagcattaggatgttgacttcagcaataagcatgctatagatcagaagttgggacagaatgctctgctatgatatacaagtaaaaagcttcttattttagaactgtagacagttagcttatccaatgaccagttgtacagctgtactatcttgtggagtagagtgtaatctatggccatcacactagtcttttcactacagcttctacccagggagggggaaaatgcaatacattacagtgaaagttaccaatacacaaatgcagaaaacctaatataataaaaataacccctctcagcctcattcacactgagaataaatgaaaatgttattattcatgctgctgtcagacaggatcatatctgagtcacatcagacacaactgaatctagcttgattttttatttacaagatccctagagaaaagagaatctacataactcaaaaaaaaaaaaaaaaaaaaggagaaaaccactccactgtttgcagtgttcactctcaggacattttggattatcctgtttaaagtcacagaaagagggaaaattagagtttaatttccaggttgactccttcccaaatttgttattttaggcaagtcacctaacttttttatgcctcagttttcttcatgtgtttatagtgagttaagaataatatctacgccataggatttctggaaaaaaaattaattaaaataaaaaattcttaaatatcctgaaaactctgttatgctatataaatgttagttgacagtaatagttcatagtggcagcagtagcagaaacagcaataaccaaaggcacacatcatcgattgcataaccccttagcagggccataatcaaacacgttaatattcctgcagcaaaagatatgaatattgacacttagtggaataaacaaaagaatataaattgcctgctgtcagtcaaggtcagattttgctgccaaataagttttgtggccaaatgtataaaacgaatttaaaaataaaaaccaacaacaactttttctggatttccgaattatggataaatagatttttcatttgaactaataaaccaacatacaagccacactttactatggaaataatggttattaaatgtcttcctagctgttctgcatctcaactattctcatttcactttccttcctaatctaatacctcaactgttttttttaaacttatcattccattgcccttcttttaatactctccagtctctacattgctaggacaagttttcaagcataataggaagacaaacactcccaaatatgatgacagtctcctagactggtcccgtttccctccaacccatcctccacctagcagtgagagatcttcttaaaatgaaaatttagatgtggcacctttctgctaaaatctttcaatgcccttccataattctactcaacaaagatctaactttttaatatcgtgcacaaagccttttctgagctggttcctgcctctctttccagcctcattttgctgctcagctccctccttccccatccacaaagcccatatttcagtccagccaaatgacttgcatttgtgaatatacaatttcacagtgaatatacaagtcaatatacaatttcttacctctgcattttgctcacaccatcccttctgctatgactgtccttccccaattaggtctgccaggtaactattactcatcctttgtccatcctctcaaaaaaaaatttcatctctgaagtccaccctgtcctttccacatttcttctaacactcatgccgtcttaagccagcagctatcatgccctaatcacattgccacgtggaccgcattatggcacaattacttgctataattatgcatctactcctcttcccagactcttaaataggcatccctggtacagcaaactggcacaggcactttacaaagtgagtgcttagtgagcatctgcttcatgaataaaagtgcttcctataacttttcatcaaaactacagatgttcaaggtatatgaaaagccaccactcactaactttaaagttggagaaaagttcagatgtcttttatttctcagataaaatttaggtttgttctctaactgtagttctcatggaagaactattaaacagtctggtgctcaagttgaacaaaattctctgctttttaccttagtctattcctaaaacaagaaatacaaagcatttaagcaggtatcactagcactagacaaagattagaatttagccaacaagagtttgctttcaagttgcaaagctttcagagagagaaaaatgcagagagaggacttaggtccatagaatttttcataaaggcatgactttcccaccacttccaggggagttacttcatgtgttggtgacatttgctctacatgccaatgtctgaaaatccctggcatctaccacacaagcatatccatggtaaggagaaaaatgttccagaaagaaaaatgcttagagtgtgcaaggatagtcttgacaggaaaacctgcaaggaccaaaacacatgtctgaaggactcagatactattcagagacactactaactagtacattccaagggtatttgggatgaataattaaagatactttatgtattaggaaacactgagcctgtcatattcgttcttttcttccacttatcatttttgtctttatagaaaccaggtttctttttacattaggaagagcagagtcatccccaggtgggaacggctctgtcttatcttattcatcttccatgactagtatagtgtctgtctcatagaaagctcttgtttattgaacaaaactaaaaattttcacttagagaacatactttcaaaaatctctttctacatcttagctctaattagaaagtatttctaatgtactgatttgggtgactgcttggagttagggcatggtacttttttacctgaggatcaggtacccggataaaatgacctgaactctggtatccctaatactacttgccatggaccttcagccacaggctcagtcaaagccacagaataagtgacagaacactctccctttcctcctcttccctgaatcacaaaggtcctggtattccctcacatggttttgctcaaataaataaggaggcatgaaataatcccggggaaaaacagcacttcagtgacaatgaattaatcactaaggagagccgatatcacagtaccatattttaaaaataacaatgtaggaaagccccagtaaaatatgacaaatttgcagaacttctgggtggagtttgtaaaatactcacttgtccatcagacacagtctatcttcttctgccttggcctagagtgctattgcttaactgtagggattatctaccacaacattttacaatgaagaaactgagacttgaaaggtaacttatgcaagttcacacattctaatatccaagggaaatactgccttcctctccttcatatcagagctttgtcttgataacagccctacttgaaatggagaaatgaccagtatcttctaccctccacacaaaatgcttcaaagatgaaagcacaattacagagtttagagggcctagaacacttgttcaaggggggcaaggacaagaagaacaagaagtgaaatgggacagaggagctctttctctcgtttaagacttataaggtgctgttgaaaaatctacggataagcatcttaaatcatggtaaattacacactgcatgctggtgactcggtcatggaaaattatgaagctacgtgatgtctcatttgttgtgctgaaaacaaatgtaaataaattactgagagaatctcatttacatttagaaattcatcctgacgcatgacatgactaccaatttttttaaagatactttgagaagaaatgccactcattaaacccagatcatgaggatcatagtatgagcttgatttggtacagggttttcaaagcaaggaaacactaccctttcatactaggagaacccccccatcccccaaccctgccatgcatacacacacacacacacacacacacacatacacacagagaaagatacactcactcactcacacaagggagaggaaatagcattaggcttgtggttgtttctctttttctaatgatccatctgctgttcctcacgttcacagacaacactccggacccattgttagtgggactagctggttgcccagtagagtggatggttcatggtgagccattcacaatctctcaccccattccacccatgacctaaggcagctggcaggggttaatgggacagaatggagttaactggctcctgcagggatcaaacccatgaccaatctcattaacactctgctttgaccaactgagctgcaaagccatggactctcgttgaataggaattggtcatcaagtggcacagatgccctgcactaagaagcagctgacctgaaaaggcagatataaaatgcaggagattgatgggattggagcaaaaaccttgaagggcttcaggtctagggtagctgttaggcttgttgccatgcttaatttatcccatccacctctccatgactccattcaaatcacccagggcaaaagcaaggacttacgaaacagggacagagagttacagcacattgaatgtaatgagagcaaatcaggcaagcacttaataaaaagttttgagaactgttatatatagtctaaaaagctgcagctacaaaggattgaaccattgtctcttgctgatattacactacacttagcatcctttgtgcaatattgttccttcgacatcggataaaataacccatcctaatgccctgtcttctaagtgagggcctgggacttaaacttttttcctctgcagctgtgactatgggctcgctttccagctcttaaatgtcctcccatcttttctcttttccccattctaaatagatactgcaaaaagttgttaagttttgctttccaccccacaagggtaaaatacaatcatttcctaaatagggatattatggtgtgctcggtctcatccacagcagaatatttacatgagcctgaagaggtctgagagtttattggttaaggaaaaaataaggccatgaaataattatttttcattgtgccctgccaaagccattcagccaaaggctaaattgagctgctattgtgattatttgaactgtggagccaaaagtctttgctgcaaagcatcccagctgtcctaaattttgttctgatggttagttttcatttgggctcagaccctgccaaaaaaatggtccccaaaataggcgggtggaagggttgctttatccagacccacatcaattaccgatttagggccattcagagaacttgattattaacaaatcacttcctgaaactgttatgacaggattcccatatgcaaacggcaagtcgctcatttgcacacagtgaggtgaggaaattaaaactaagacttcccaaatttactgatggtcacttttttttttaacgctgattgtactttatggctaatgagtttttcccaatggtcctcacagctggaaggctgcagcaacagccgttgcccaggctggattaatgggagcatcgaccctgtgcttgcctggcacctcaaccggtatgtctagtgactgtagcgtttcatgaccgagtaaaatggcccttctagggctttaggaagcaatgtacactttgttttgttcagtttggcatcccccacatctggagcaacacctgtccattgtaggcactcaagctgtatgtgctggaaagaaggaaggaggaaaggagggaagaaagtaaggaagggagggaggaaggtaggaaggcagggaggatggatggaaggaaggcaggaaaggaggcagactaacaatccagtgggacctagagtttaagttagtgttgtcttctaaataaatattccttttgtgtgctgggatgaacacatttctgaaaactaatctagtgtagaggcacagaaaatagccaaatcagttatcttttatcaaaccattacttgtttctactctggccaagatccattcacaatggagaaaagaagctaatgcaatatattaatttaatgcatgtactatcaaaatgtacactaacttaaacaaaaaacaatgtgtctctaaaagattccctaagattttcctgcaatttacctctccattaatatatttcagaaatggaatcagctgcaatcgtacatcaataccacgtaaaccaataaggcccatctggagggtacaggaaggaaagcagaataccagacaccaggaggagggttcccagagactctcagggaaactattcctgttatctgcacctacatggcatccagagggagtttcctggagcttcaagttactcccacttcttataggagaagtttgatgtgccacgaagccaattcttcaatgcaggggtagagcctggagacactgaaatcaccctttggagtgagggtgggtttttgtcatttctggaattacttggaaggagggcaaaatctttgaaagcaaaatttatataacattagctgcaatttaaaaagtaatttccacccatattcaaacaactctggaaacctccttccttgagatgctttcctggaacaatcacaagggtgtggatttccttggcgtgtctctgtcacagaatgatttgctccctgcccactcacttccccaccccgacccttgccccaaaaactaaaggttagggatgggaaaggagagtatttacccacccaataatcagaacctctgtcaaacatcagccatccctaactgtccatcagagctaactagttccagatcagtctgtgaagtcaccatgcatggcaatgcatgagcagatgagccatcctttaaacagagatggtagctagaagatacagtcatgacatacaaggaaattcaagatatcgtaaacctaaaagatacatttgaaacacaaaatggttttgtgattaacagcagggacataaatgtagggggttttcaaataaatttagagctgtacagcagggcactgtggctcatgcctgtaattccagcactttgggaagcccaggtgggcggatcacgaggtcaggagatggagaccatcctggctaacacggtgaaaccccgtctctactaaaaatacaaaagattagccgggcatggtggtgggtgcctgtagtcccagctactcgggaggctgaggcaggagaatggcgtgaacccgggaggtggagcttgcagtgagccgagattgcaccactgcactccagcctgagcgacagagcaagagtccatttaaaaaaaaaaaaaaaattagagcactgaataacttcaggctaggacaggtaggtagtttgtcatggctgcttctgaggacaccaccagagaagttagtgccaagaaggaccttcccaatcaccccctccacagccacccacccacacccactccaattcccatgtaagagacaaacacaccaaagcctggagacatgagcatcattcaaaatcaccgtcaaatgcaattattcttttcttaattcttaatctctattttttcctctccaccccatctttcctttattgtccccatttcttctcaaccactttatcatcttttagttctccctgactatgtctcagggcttccttcctagcagttgtaggaataataagcacttgttataccaggaactattctgagagctttaatattcaccacctcatttgatattcacaacagctctatgagggaggcactattattgtctgcgttttattatagatgagcaaattgaggtatagagagattaggtgacttgctccagattactcagccaattagcagcagagatatactttaaaacatccttccacttacataggaggaaactgaggcatgaagagttttagtaacatgcccaaggccactcagcttggaagaagcagcaccaggactgtggagcccctgcatacactcaccaccttcctcgttatcctgctcaggaccccaaagctagaagccttaagggaccaggagcaatgctgaagccaaacagctgtgctcgataagtcccagagtctacagcatcatcaggttaaaaaacgtatttagaaatctagggaatcaggaaaaggcatccacagagtgcttttgttttctgaaaacaaggcaagaattatttagcatatgtttctgcagaatgattttgccagtgtcagtcattaaaaataaacgcttagtagggtgacatctatttcaaatagttgtagccaaaaataaatttctgctttaaaaaaaaaaagtaatggtttgataaaagataactgatttggctattttctgtacctctacactaaagaaataaagtctgtccagggcttttggttctaacttctagggtaaatcaattgggaaaaaagtatatgcacaagaaatttaactctttttcaaagacagtggggaaatcaaagaatgtccacagatcattgaaaactctattttagtcattttagcatgctaatgttcttcctcccacctgccaaagctgtttgccagaaaaaaagcataatctctgtaagcctggccccttgtctttggccaaacccttatgggtccaaacacagcccctatctactttatagaaactcaggatcaggacataatcaaagtcaaatgtcctgaaaactactgggtgaatgtttattacattaataaattgtttttaagaggaagggccctgccaatgtcctaggaagatcttggaaaatatctaacatatggttatatagttacactaccatttaatttccatagtcctggtaagtcattttcatttggtttttctattgtctcttttatacattattactatctggaataatacatggcctgagatgagagaagaaatagccaaaaaaggaaaattcttgtaaaatgataagaactaagcccatgacccccagcagaggaccacctttgccccacttttatccactgaggtcacccgtgcatggtgacttaacaccttgcctttagttgcccgacctctcatctggcctactgagccccacacaactttctgcaactcgtgatttaattcctgtctgagttggaggcataaaaggagcttgacctgtcacctgtgtgacggccacagctctacctgctgactagatgcccttctggatccatccaattggccaaatggagggacagaacatcctcccctttaaggaaaaggaagagatgccaagaaatgcttcatttcaattaaacttagcagagaatcagaaccaaatcagtcacatttattagaagaccctgcaaatggcaagagttttgaagacaccactcacagttaactaaagaataggtaaaatgtatgtgcactcaaggtgattcacttcttcccaaagagttatgggttcgaggcaggtgagggctccagcttacagtttattaaatagcacctaggtcctgagtttgggtgaaatggtggaatgcttcccatttgataacacatgtggctatccgcttgtgggtatctaatttggagtactattaatgtgtagcctttcctggcaaatctgcctaagggattagtcaccccccaaaagttcagttgaatattaaccacattaactttgcagcctgcaacatactgttacacacaaatagcctacagtgccatgtggatgacttgcttagcaataaacattccatgcagagtccccagtgcaggaaaaattgtgttccatcaaaaggaccaccctgccaatcctggctgagaaccccacccccgaccacacacatatacacacacacatacacacacacacacacacacacacagagagagagagagagagagagagagagagagagagaaagcccagtctagggtatcatggttttattcaattgccagattttctctgactatgtaagactccttttccttcaaggttttactgcaggtcaagtcccccaagattggctgaaatgatgtatctttaaaggtaagaattctaaatgttctgtgtcgattttgttttaaatctctcaccacaaaggccacatgttccttctgttccccaaacatactgtccccaagaacaacttcctaatgtctatagtaattccagaaaagccacagagaattactgtctccagtaaccagaaaagaataaatacatcctgaacccacattataaatagaaatagtcactaatcttctgctcaatgacaagcacccccttagagaagaccagctcaccaaaactccactgaattattgtcctctttccttacaccctagttcttcgttacatgcattcttcagcccttacaaaccacccttacagaggtgattcagtgtaattagaaatcgagttaaatcttagggcctggaacctctatttcttcataatgttgtacacttaattgctcttgccagttagcaacacaattatgttgtctggaaatggagacaaacaatagattttagtatttaaacaggaactgaaactgcaagcagagagccgcaaaccacaccattaaactggaattaaagctatatgtgaaaagaaaaagtttcactcccagcaatcatcagcctaccatgcaaaaagaaactacccacagatcagaaggaaggtggaacacaggaggtaaagcttgggttcctagtttaggatgggattttatgaaaaccccaggcataaaaatatgacaggataaagtagacaaataacaatgcaggacaacacttgacctttagtggttaaatgaataaaagaagcctctgtattaagagtatcccttgtgcataatcattgcctcaatgcagcctgtccccaacctctatgcctaccaagattttctaaactaatgccttactaacagggttagaaaagagaacaaacaacaatcaactgaaattcattccattttctagaaactgtcacgagaatcacaaaaactcaagtggcgcacagatttggccttgcatttccctctggatcccatgtctagaatttctatacacgcccccaccccatcacctccacagtgcatgtacattctcattataacctacaaagggatatcggtcttacagaatagcatcttacttcagctttatggaagaaattaattcagcctctatctccattacctctccatgtatagacctggaaggacttaaaacatgcaaggaacaactagagtaggtgttgccagaagatgctcctgctgaaaaggctctacagaaaatggaaagactgagagaacccacattggagacagcaactctcctcatacctacaaagaattgtggctggtaaatacagaagtccaatactgctttggaggacagacatgtcaagatatttgatgccaagttcagaggggcctgagcttttcctgttaggtgaatttgcaaaattgcagagcccctagtgaaaataatttctcccaggagaggggtgagagaaatttctgggttcaattttatgtctttgggaatagcacattttaggagtccaccatcactatttccttccaattacacaagtagtttttctgacaaaataaaattggcaaagaatattttcaaattccaggaagttttcacaagatagcaaaaaatacacaggtagttcataggtttgtgcatgggttatatgcctaattacatgggcatctggcaccaaccctagcacagaattcattgatggctctgtctagcctctatcctgccttgtacttgcattgaaaaagcctcttcccaattgttttctaggccctaccttgaaaaaatactaagtattgcaccttatgcccctgctttctgaaatgcaagcattgcaccaaaagctatgttagccatctctatgctacaacactggacccctctttatctttaatttatctttaattcaaaagtaattgtgtaccattacagctcagagtttaaaatgagctctctgaaaaacttaaaaaaaaaaaagaagaaattaattctaacccttacctttggcatcttataagacttttggccatgacttacctgtataaatagaaagaactaatttactacagaaatgcccatgggcgaacatgtactagctaatgaagtgttcagcttttgcatgattaaccagctggtgggggtagtgtaaaagcagagggcataaaataataagaaaaattgattagcagtcgttttttaaagtagtccatgaaaaattcctttttttatactcactagctcagaaaccgaccgtaagggaagaaaaacttgaatgactcaccaggaaactgagcaggcccacggctgctgtttgtgtgttcaaaattcactaagtagggaggcccaggtgaagcaggaaaagacactgaactgcttccaaatggactgacttacacaacaggtcctgccagttgtcataaagttaattttctaatatgttgcgaaacgcattatataaagttgaaaactatgactgggctctgtgtccattcaattttctctctggagcactctgctagaccacacttggctttaactaccgccagaccaattcattaagaaaaagggtatagtcttgagccagaatatttatacacttgactcagaaacaatctattctaggggatattttcccaagctaaatgcactacaggcctttcctattcataacattctttagctggtctgcaactcccttaagtgaaaagaaaaggagtcaggtccaaaaaataaaaacgcagctgaccaaaaagaaaggaatggctaaggaaaggcgcgggtttgaggttacttataaagcaatgaaacgctctttcttccatttgctttgatgacacaactaatatttactcagcttagccctccctttagcacagggacaggcatttcccaggcagggaaaagagaaaaaccgaagctgggtatcctcactagcacactgtactacagccctagattccaccttctactgggatgctgaccatgtcaaagaaagaataaggtggtgcggaggcagtgcctacacagagattctttctctccctttccctttctctttctctttttctttctctttgtctctctctctcatggacatgaccataaaccaagtgatcaaaccacaagcctccctgtcccttcactcttctctgtggccatagataacagccctcttcccaaccagacctttcacagatttgcagcagaccataagtagaaccagacactgagccacgcatgggataaacagaccaccattacccgaaactcaaccattttcctatgactcccaggtagaaaatcattaatcccactttaccttttaggtttaactatgaaaaacttcacagtgtggtgggaaggccactggcaggtctagaaatctgagttatagtatgaggtctgctgctagcctagctgtgtgaccttgagcataccgcttagcctttctgatccccagcttcctcatttacaaaataaagtgttagacaagatctctaagccttctcccagttctaaggtcttcattgttatttttttctttgctcactgatatgtcaataaactaaaggagatgggctgagcatttgtcaaattttacattataaacatgttccagggttgtgttgtccaatgtggtggccactggccacatgcagtgactattgagcacatgaaatgtggccagtctggatttcagagagtacctccaaagtgcaaaaatatcttattcataatttttgtattagttacattgaaatgctaatatttaggataaacagaatgcatttttaaaatcaccagtgcccagctggctcagtcagtagagcatgagacttaaaattaaagttacctgtttatttttactttttaaaatgaagctgctggaaaatttaaaattaaaaatgtggctcacattgtatttctgttgcacagccatgctctaaaggagagtttggcaaactatggcttgcaggccaaatctagtcaatggtctgttttgatatatcctgaaagctaaaaatagtttttacattttctaagagttattttaaaaaaaactatgttgtagaaaccatgtgtgaccagtgaagtctgaaatatttactatctcgccctttacaaaagcagcttgccaaccactgctcacacctctccttccagagttcgggtactacagtaatacccaagtcttcaacacagtgccagaaaacatgcactgagagagaattcccctaccaatcttcatattcccaccattgtcctaaaggtgttgggagagaataagaggagaatcgcagaaagagaaggaaaggagagtccacactcaatgcttactttttccttgtctaactagagtagcagcaatgcttacacacatttcaaccttacagctttcagctttcttcttaagagaaaatggtttagcatgaagaaactcagccaagggagaaacatatgacaactttaatctaattttgtagcatattttggggggacacatttacagagaccaacagatatggtttggctgtgtccccacccaaatctcattttgaattgtagttctcataatccccacatgtggtgggagggagccagtgggagataactgaatcacagtttcccccatgccattctcacgatgataagttctcaggagatctgatggtttcattaggggcttcccgctttgctcagctatcattcttctccttcctgatgccatgtgaagaaggatgtgtttgtttccctttccaccatgattggaagtttcctgaagccccccaagccctgtggaaatgtgattcaattaaaactcttttctttataaattactcagtcttcagcagctctttatagcagcatgagaacagactaatccaccgactgccccagtttgccaggatcaagagctttctgtgaatgtggaattttccccttgctaaggtgctaaattcaggactgtcctgggcaaaccagaatgagttggtcacttcaaatctgaccaattaaaaatatggtactatgttatataaagaatgcaatactaatcacattttttaaaatagaaataccttctttaacaagctacctgttgaatttttgccttttctactttccttgccttttaactactgaaaattaaattttcagtaagttctccactgaccattcagttctttcattttatgattttggatcagatccctaaccatttctgggcctcactttttcctctgtaaaaatatactgagtagatagtgcattcttcccagttacttctagtggaggataaaacaatagactcaaagaactttgagtcaattgaggattcacaattcaagattgatggtcaatacaggatgactagacaacaattgtccataagatggattttttaaagtgttttaaattgttcaatgttgtaactgcttgaactggagataacgtagaactcaacatgatccagcttctaaagaaaaaattatacaaatggtacttcaaacctaaaaaagttatatattctgtacatataaacctaatggagatattttattatttgtttcattatttgggggtgattgttttgaaaactgtggatgaaatgatagtacatatcagtttcacaaacaattgaaacttcaagaatggaattctccatctcccaaatgctatgaaaatattctcattgtttgggaaaagatggtgtcattcattgcatattaaacacacactctctatgtttcatcagggatgctctattgtgcaataattggtccccattgttacatgcacaatttggctgctcacatgtaaaagtaaaacctcttaaatagctatctccactgatagccttcggcacagaccgtcccctgtggccacgtgcctgcagcaacccatgactaaggcttatggaaggggagggggagattaaaagggggtgcacctataatcctttatttatattagaaagtcacccctgaaacctcattagcaatggctgagtgctgtgtcaagtcctcagcaagggctttgcccagagtggagtttgctaagggaaatgtagtggccgatgcccaggacagagggaagacactgaaagacaaaaagttctgctgtgtcctagcccttctcctctttgcagaagcacctgtcccctttttgtgcagtacccagttccacctatgctaaactcacaaatctcagaggccatttcctaccttaactatcactgatgcctctccacccctgtgagttcatacagtagagatggcctctgaatattgaagatattttgggttcctccacattattgaaattctccctcctaacttctgaactccttttatgtcaaagtcacgctttggagattttgtaaatgattaatgtttggatgtcttttttttaagacattaatttattaagcccaaaaaagatgtgaaatattctaaaatcagattgtggtgatggttatacaactctgaatatactagaagccatgaaattgtattctttaaaagggagagatgtatggcatgtacattatatctcaataaagctgttttcaaaaagccatagaaatccaaataccttactttcaagtaattaagaggcatagttaccagttagcttaatttgacctagtaaccctctgctgtgaataataatagctaagtagcttgagtgggttctttggagtaggcagttcatatagggtcttatttaatgttcatagtaagcttatgaggaaggaaacactgttatttcacagatgtgaactccatacttaaagagtttaaatacgttcgttaaagctatgcagttactagggaatggcagtgagattggagccgaggcctccatctccagagctcagtttctgaaacactgtgcttatctgaacatctagaactggcttgatttttgactgcccttcactataaacaacaatcatcctgaatgttagtatcattctgaagagccagacaagttctttcatctagctatggcttgattttatacaataggacctacaaaacagttatttacatataatagatcctcaataatctataatttaataggcatttactgaaaataataatgtctatgagattttgcaacttgaattacattttaaagcatccagggataaaacggcttgctgtagaaagggatctctttggcttctacataaataaaaatggtaaatatctttcgtacccatatagccacatttttaggctgcacttatttcaagcaaggtattctgacaactgttagagtttgacagtttgagacacgttcttttgaaaatttttggtccccgatggtctgtctgaaatgctgccactcctgggtctagctcggataggcccggaggattttcttcccaattcagtgtagttctgagaaccactggcggacctggccttctgcagcaagcttcactctggccacaaaacaattaagcacagggtactgacatctaaaccactagggcaatcactgcttcccatgagacaaaagccaactttgtcctgtaaaatctttttaatacagataagcaaagataggagcaaacccaaagcatgggagcaggtagggcagcgttggtccacgctcctgctcctcttgcatcctgttcagaggtccaggaggacagggaccaggctgcagtgcaccatacgtaacaccaggtacattctgtgcctaatgataattgtaataacacagacaaattgtgggcaagtaatccataatgaaatattacaccgtaaattagagggtcaagacccaggatttcctgcattgcatggaaaaacatggaaaataacgccttctaggtatctatatgttactttatttttaacaaggctttaaaaaagacttctaattaaatgtcaaatcccccttgctgatggagaacaagatagagcaggctagtccagagttcacatcttagtggattagtggtgtgaccttggccagatttccttacaggacttggcctgagtttcatcattgttgaagtaggagtaataatatctacctcatcaggattgatgtgagaattaaacagatgatgtataaaaagtgctgagaagcctggtgcagtggctcacacctgaaatcccagtgctttgggaggtagaggtaggaggctcacttgaggccaggagttcgagaccagcctgggcagcctagcgagactctgtctcaaaaaaaaaaaaaaaaaaaaaagtggtgagccaagtaccaatgtggtgtctcagtaaagaatagctgttgttgttactgctagtcctagtgggtacataagatctcagaaattgaggaatgagaccaaggttactcaatattgccagtgtcaaaggaggcctatttttttactaaatttcagacagttttctcccctagacaatcttctccacaaatccagccctttccaaatgtgtctggccacagaagtgagctataaacagaaaaaaagttactaggccctgcgatatttaataggatgttttggtttaatacaaaagtcaaaaactttaataaagtaaaaactctagggattccgtgaaaaaaaaaaaaaaatcaggagctggaggcagaaccattccaaaggaagtataaataacttgtcagagttttaaggagacttaggattccattattagcccaagtcatatctatgcctctgcccagtgtccttccccattaataagagtatggatgatgtggcaatagaaactatcaacagagtaaacagacaacttacagaatgagagaaaatttttgcagattatgcattcaacaaaggtctaatattcagcatatgtaagaaacttaaacaaatttacaagaagaaaaaaccaacctaatttaaaaaatggacaaaggacatgaacagacatttctcaaaagaagacatatatgcagccaacaatcataggaagaaaagctcaacttcactgattagaaaaatgcaaatcagagccacaatgggatactattatctcaagccagtcagaatgggtattattaaaaagtcaaaaaataacagatgctagtgaggctgtggagaaaaggaaatgcttatacactgttggtaagagtgtaaattagttcagccattgtggaagacagtgtggtgatttctcaaagtcctaaagacaaaaatactatttgacccagcaatcccattacttggtatatacccaaaggaatatatattgttctatttataaagatacattcatgtgtatgttcattgcagcaccattcaccatagcaaagacatggaatcaacctaaatgcccatcaatggtagactgcataaagaaaattgtggtacatatacatcatggaacactatgcagccataaaaaggtccaagatcatgtcctttgcaaaaacatggatggagctggcagccattctccttagcaaactaatgcaggaacagaaaagcaaatgctgcatactctcacttacaagtgggagctaaatgattagaacacatggacacatagaggagaacaacacacactggggcctattggagggtggaggttgggaggaggaaaaggaccaggaaaagtaactaatgaatactagacttaatacctgggtgatgaaacaatttgtacaacaaacctccatgacacaattttacctatgtaacaaacttgtacttgtacccctgaacttaaaagtaaaaaaaaagaaaagaaagaaaagaaaaaaaaaagagtataggcgatggaaaccagccaatcagtcagcagcgtgacacttccctcaagctggtactgacctcattcctttttagctctcctcagtcatgcccgagttgggagatgaccactagagaagaatctctcttcccaggccagaggaatcacttccaagctgcttcctgtggaccacaaggctgagtttgttctgcacaaatggtaaaggactgacaagtgtctcagggagcctgatcctgctccctgataacaaatattcagttttcctttttacccctgatctgagattcctctctaataccaagataaggtagatatttatcccttccctcctttgtttaagagaagactatttgcactactccaaatgtttcatattttttcttatttcactgtattagtctgtttttatgctgctgatgaaagacatactggaaactgggcaatttataaaacaaagaggtttatggacttacagttccacatggcaggggaggtttcacaattatggtggagggcaaggaggagcaagtcacatcttacgtggatggcagcaaagaaagagcttgtgcagagaaactctcattttcaaaaccatcagatcacatgagacccactcgccgtcagaagaacagcacgggaaagacccaaacccatgattcaatcatctcctactgagtccctctcacatgggaaccatgggagccacaagatgagatttgggtggggacacagccaagtcacattattccaccccagcccctcccaaatctcctatcttcacatttcaaaaccaatcacgccatcccaatggtcccccaaagtctcaactcatttcagcattaactcaaaagtccacagtccaaagtcttatctgagacaaagcaagtcccttccaccaagagcctgtaaaatcaaaaacaaattagttacttcctagatacaataggggtacaggcattgggtaaatacagccattccaaatgggagaaattggccaaaacgaaggagcaacaggccccatgcaagtccgaaatccagtggggcagtcaaatcttaaagctccaaaatgatctcctttgactccctgtctcacatccaggtcatgctgatgcaaaaggggggttctcatagtcttgggcagctctgcccctatggctttgcagggtacagcctccctccaggctgctttcacaggctggcattgagtgtctctggcttttccaggtgcaaggtacaagctgttggtgtatccactattctgaggcctggaggatggtggccctcttctcaccgctccactaggcagtgccccagaagggactctgtgtggggcctccaatcccacattttcctttgtcattgccctagcagaggttctccgtgagggccctgcccctgcagcaaacttctgcctgggcatccaggtgtttccatacctcctatgaaatctagggggaggttctcaaacctcaattcttgacttttgtgcacccacagtctcaacaccattagctccttacagttaaactgtgactctatcttgaattccatgatcactctatcccaggatagatggattgtgaaatgacagtgatatggtttggctctgtgtccccacccaaatctcatctcaaattgtaatcctcatggaacctgccaaggtttggggtttccaccctttgaagcaacagcccaagctgtaccttggtcccttttagccagggctggagcagctggaacacagggtaccaagtccctaggctgcatagagcagggggttccctaggctcaggccaggaagccatcttttctttccaggactctggacctgtgatgggaggggctgccatgaagacctctgacctgcactggagacattttccccattgtcctggggattaacattcagttccttgttacttatgcaaatttctacagctggcttaagtttctcccccagaaaatgggattttcctttctatcacattgtcaggctgcaaattttctgaacttttatcctccatttcccttttaaaaccgaatgcctttaacagcaagtaagtcacctcttgaatgctttgctgcttagaaatgtcttctgccaaatatcctaaatgatctctctcaagttcaaagttccacaaatctctagggcagggacaaaatgttgccagtctctttgctaaaacagaaaaagagtcacgtttgctccagttcgcattgagttcctcatttccatctgagaccacctcagcctggaccttattgttgatatcaccatcagcatttttgtcaaaaccattcaacaagtctccaggaagttccaaactttcccacattttcctgtcttcctctgagccctccaaactgttccaacctctgtgtgttacccagttccaaagtctcttccacattttcaggtatattttcagcaacaccccactcctggtaccattttactgtattagtgcgttttcatgctgctgataaatatgtacccgagactgggcaatttacaaaacaaagaggtttattagacttacagttccacatgtaagtgtggaggcctcacaatcatggcataaggcaaggaggagcaagtcacatcttatgtggatggcagcaggcaaagaaagagcttgtgcagagaaactcccattttcaaaaccatcagctctcgtgagacccactcactatcacaagaacagcaagggaaagacctgcccccatgattcagtcatctcccactagctccttcccataatatgtgggaaccatgggagccacaagataagatttgggtgagtacgcagggccaaaccacttcattcactaaatccattataagtttcctttaaagcacttaaattaaggctttaccctaccaattatttgtatttgtttttacaaccttttgatatgttttcaaattgtttgtatctcattatgttctgttcatcctcctacaatttgaagactggcttttgttttttccaccccatcccagtgcttcccaaattgtagtattctatacacagtcacaaagtaatcaacataactgcatccactctgtcttaaggtttgtaggttaggctccatggaaacatatggaaataaagataaacacccctctcctacacacacatgaacacacaccacacacaagagcagggtgagaatgagacagagagtgtgtgtaaggtgaggaatggcaacaatggctaaattattttaacgcagtgatatctcacacaacatccctaattgccctcatgttcttaaatcttctggttcataagaactatgttgctatacatttttttgaaatttcaggctggtggttgcaaaatgggttatttagacggtaagaaaataggtatttggactggtcatggaagaaaaaagtcactaggctggtgagttcaaattctgtctcttctgtggctttgctgagaaagttaaggaagtcattgccttgtctccctgtctacagtccaatgaagaaggcaattaagaggatgccttgaacccagcctccacagagagaaaaatatccccctttttttctacatcacctgcccttggactagaatttcataattctcttcaaactattcattttgttacttcaggatatagtaagtaaagctattgctttagttaagctttttcagcaataagttagcaatcaaaaactttttttatgctgatgactgttttagttttgaaatatttcaagatttttctattaaaatttttttcctatcctgtgaaatatcttcacattgctagtacacctttacacttccaaaaatcctgtgagcttatttgttttgattatgagaaaactgaattaaggaggttcagtaatttgcccaataacacactattagcaaaaatttgggttgagactcaaaccaaaccaatttgtctccaaatcctactctttgtacttatgctagctgcacagtggacctcagtagatactatttggcctactactccactcaacacagatggagggccagaaatttcctggacctaaaggaaatacataccagatcaattacatcaacacagggaattctgagtttgatttgcagtttctggcaatatatcccattgccctataatatattcagttactccttttttacattgggaaccctcaacagctcagataatcttttacatttagttcagttcctttcctgctccccaatcttagtttaaaattctccacagagtgggtgtagagaattttaaactaagcatgaaaaaatattctcatctttttcataaaaaaacacgaaatcacagagacccagggatctctagctaagaggccccatagtcagaaacactgtaaaaagatcatagctgacaccacagttggtgaaaataacagcctgcaagctgtgccaaaagccctttttcctcatctaatcccctatcattcttctgatacaagacagcaaatgcattaaatcctttaaacattcatagcaagttggtataaaggtagtacattttaagagttgaaagaatgtctataaacacactcacacacatatgtatatatccatccacaaataatactacatagttttttaaaaaaaataggttcagtagagacttaaaatagtcatttaatctaattgatgccatgtatgacagtaaagaagctagctatgcccaagttagatttaaggagtacattttccatcttttgcttctctggaaaaatcagtcaccacaacaagcccagtatatatggtttttgtttattgtttcctccctggaacattaaagtggtcttggatatcagagagtaaacaggcatctgactgtcaccctaccagctggcagattcaagtgtcacagctaaagcccacacctgcttagtttcctacagaatcatcactttaattagaattagatattggtctgtgagtatgtgttctaattttattttttattttaaatcttgctttggcatgcaatatctttttagattctttgaagggaataagtatgcttatcccaagaaaccagtagggttatattcaaagcaatgcacccagtaggttcacatcattctggcatgtatcatctgaaacccatgagtaccatgtgagggctctgtcatttggctgtgctgctgtcatcttttgatggtccctgatagcattccatttcagtttgaaagaacccatcactctaataggtgggcttgctctaaccatagatacgtatttctgctttgataaaatgtagaattatttatattatggatagctctatttgtttttcttgaatcactcagctatacagtatgctgaatgacatataaatatagaaattatggaaatagagaaagcattttatccaatgcagatcctgagttgctaaaaatgagtcactaaaatttcccactagggtggcatttcaaatctaaccttgtcccaaataacaactgaccaccaatttctttgattcccaagaatggagagcactgcagtgtgactcaggcacagagtgttggctgtttcagcttgaagcactcacctaggaggaaagtaaaggaaaaaatgcacacacacatacacacacaaacacacacacacacacacacacacacacacacacacacacactgcatgtgctctgacatcctgcagcagtaagagaacacacagaggaattccgctacctgtccctagctccccacactcccccctgcccttgccccacaggcccattctaaacgtgcaaacagtatcggtataagtgtttgtaaacaaggaactttgaagatgtttctaattctaattataaacagtccgagctaaaattagaaacccaatctgttcactttaaaaaaaaaaattaaaaagctctccaaaagggtctatttaaataaagcagccagtaagctctgatttggcaaggagtggtgaactctggtgacacagccagggaactgctaattgtcagcatttccactgtgccatgaggtatgcttcctagttcctagtgaagaaagccatgattctcatccattgtcatagtatgatactgtcttctctgggacaggacattaatgacacctctttactcggtggcctgatatctccctttataacctcaaacatgttaaaatgcattctcataaattcctatttttccttttgcttccagctccagtgcaaatttaacgccaaacattaagcattacttggcattcacaaacacacacacaaagacttaataataacctctgtatagatgctcaagtcttgacatccatcaagaaactcagcaaagaagacaaacttcatacatctgtagggctatcacaccacattccaatcctagacccagcaaagtaagctgccctcaccaactgcagctaaattgggcctcaaagatgctttccataaatggaaagaaggaagctgggttcagttacaaagaggaagcttttctctcccatttacacaaacaatataaaattgccagactcaacctgaaaagtttgtgtcattttcaaagcctatcaataataaatgaatagtgcacaacttatctctaattaaccaaaattctcagttatatttcctaaaatgaaacacgtcattgttggccctttttggtcttacaataccattccttagtactttcattaaagagccatcatcttaaccagaattttaaatttagctacttttgtacttattttcattgctcttacattgagccaacttctcaggataagaggcaaagaataatggggatttttttgcaccccaatcctggctcttaaaaacatatataaacaacaatttgagtcatattactaaaaaaaagtgttaatgttctttatatagattgtgcccatacaggaacaagtcaaaaactaagaactcaaaatagagagctaaatgtcagttatctgggattacagaaaatatagataatggtccctccttaatactaactcactacatattagcaacagcttcagtctcatcccttccctaataccactacccagagctctgaagaaaagaaaaaaaaaactgccagattttaactttacctttctccaatttttagaaaagaaaccgataggaataatatagccaaaggcaaataaaaatagaaaaaaaaagtgtggatcattttactattgtaccctcaatctcaagacccagtcaattattgaataaggcaataattggctttcaagtttactgaagtaggtagcagactttgaaatgcagaagctcaaggcacgtcttcttcctccataggatgtacaatagatcattctgacattctgtccactgaccaccctcccttttggctacatggaagtccttgcccagattggcctctgtgactagccactgcacattagcctccctaataccttgggctctcctgcctccctaattttctcaaccatggggaccctcctgccatctgtacacactcactgtgttcattaactacagggctgtactaaaaagattcatgtaatgacaattgtatcccattgcaagtttcttctatattaaattaaattaatgtgacccattcctggaaatctttaattcatctcttgttggttcctaacgtaattcacatactaactattccaaacctaatctgtacaccttcactccctatgctgacctccatctcagcttaccagtgagactaaagggcaattgcagctccagataacttagaaagagggacacaatcattgactataaatgacacataaagtctgagtccattttcatattttctgactggcactttttaagaaaaaaaccagctctgcaggaaaatggacttcctgccgaaagcttcagcaaaaacagccaccagaataattcactggcacttggttattaaaatccctgacaggtattacttaagatgttagaaaattattcaggcacacgtgtacacatatatctaccttctatgcttgtgcactcacacacagacacacacaaacacactcacatttttagtaagtactcattaagctatctgagatattaaaactaatcacggcagttttcctttaatgttatcctcagcataaagagaaatgagcccattgtcatttattttaaaatcattctttataaaaaatagctaatctccagaagcacacctggtttattgaagtgaatacaaagatgcagcatatagccttaatgtgctcagctggggaaatatatttttttaaatgagcatttgttagggctttatttgcaaatgcaaaactatccaaggcactctttgtgcatgtagagatttgtcatttcaaaaaccacattaatataggaggattctcatcaacccctaaaagcagcaaaaaaaaattaacccttgcgggattgtaaacgacaaaaaccccataagaccaggtcaaaggaagttcaggaaccaggaaaccattgacacaacccagaagtgaatccaagagaaacttctaacataacagtctccccacaaaatctccagactcatatattcaaagtgaaaggatctgcagagttgactcgggtattaaaagtgggagaaaaggggggacctgctagagtaaacccattaactacccttgggacctcccaaaggaaaatgatgagaagtctcgagctttccctgatctcctgagatggctggtctttgtgaggaggcacgaggttgccccagtttccaaggatgggatattggaaggtttgcacagcaaggccatgtgggatagcacgtgtggctcttggccatgttaaccgggcttttcctagatacgacggcagttgtcgtttttttttcatttgatcagggaatgtaatacatcttcaaaacaattttcacccaaccggtcagagatgttaaaatccaaccctgaaagcctcccttgggcgctttccctcagaggcacactgtcctttgctgctatgtttcttttgaaatatgtaattttcacaaaaaaatctttggagtgtttgcttctttaggattttttaagtatttaaaaataaaatcaaagtatatagttagtatagattgagatgcctttccatttgggagcagaagaaaataataattctgctaaatgacaagaggaacacaataagagcaagtaggttggcatttccagtgctaaaaaacataatgtccgtgcagctcactgtgacccaaaagagttaaggcatgtcgccaataaaaggaattatgtcaggaaccactgagagcctaagctgcacattcctttcaaaaaaaaaaaaacctaaaattagtgctaactttttctacttatacccctgatggatactagcataataccaggagatacttcctaacttttaattttatatccctatagcacctagcacagtatcttatacaaaagagatgatcaagaaataggtgttggattgaccaaatgaatccacctgctagcactgcatcaagaaagacatgttagccaagtacacctaaattagtttactgactctttagcctaaaaccctttgatggctttccattacccaccttcagataacattcaagaatcttctaattatttagctcctacctacatttatagcttcatctctcatcaagaattttgcaagtatttggggcataaagtaataataaagttgatttttgagaggaaaatcttaagaatcacacagaatgggataagaatggagatatggtggctcaggcctgtaatcccaacacttcaggaggccagtgcaggaggatctcttgagtccaggagttcgagaccagcctgggcaacatagtgagaccccatctctacaaatgatcaaaaattagccaggtgtggtggtatgcacctgtagtcccaactactcaggaggctgaggcgggagaattgcttatgccaaggaattttaggctgcaatgagccataattatgccacaggcactcagcttgagcaacagtggtgagatcctgtctcataaaaaaaaaggggggggaatggaagatatgcaacatcattggaaagagacaaaattattccttagttggtaagatttgttgtaagctgattgaatatattaacatatgtaagtgaaggatgtgttactcaaaaagggaggcagcatgatcagccatgggatatgccatgggagaaggagtactaatcaatatacttacataacatctggtctcgatggtaagcctgtgcctaccatgaagtggttgtatcaaactacttatcatttgaataatctagttaccatcttctaatttaatacccatctaccaactttatgattataatgtgatttcctaaagaagtatcgtttttgagccataaatctgtatatcctactgattactaaatatgtccacttggatgtctcataggaacctcaaatttggcatgtccaaaactgggctaatcctcccaaccaattctttttccagtgttttgcatcttggtaaatggcactgtcatccatccatgaaacccagaaacctcggactctcacattcagtcaattcacctcatctaattaagcaccaaatactgtcaatcccaccttctagatatttttctaatccattaatttccctccatccccattgtcatcactcaagtccaagctacgaatatctttctgaggagaccttgtttctatttttagtagggagaatattttggaaataataaatagatacattaaatcatattctgttgcacctatccattttcacagctaggccatgatgatcattgttccaatgggggaagcagatgggaatgaccaagaagaaagaagaaatttttcagctttgagtctcaaagctgacttgcttgatctctgtagctagacagaagcctcaaaagccaggctttgtacaaagagagaaaaggaattctaaatcccatagttaagtgctttggcttttataccagattgtgtgtttgactataggccaagggagagagaatatgcaatggaactagagaaaagaagtagcccacatttccagaccacggtatcggggaagaagaagaagatggacagaggtagctgtagcagaccaagaaatatgtgtagtagctcacttctctgaagtgctggatcaggtgggcatctaaagagtctttctctccttcctatttgagtctgtctttcagggtcctccctaactagaggagcccagagtagaggtgaagggaaacacaagttagcagagagtaagtgtaagggtagcttcccagttgtctctttggcttcaaggtagtacagcaggatctaggaggtcctgtgtgctcagtggagggacaagggcagtcgctgacggtactggttagagaggccacagagggcttgggctgggaggtggagagtagagggtattctgttggattccagatggaacacggagtcagacttcagacagccatgatgcaatagtgtcagagagagctcaggtgcaacgaggcagcagaggggactgccaggccccaatctagctgaaatagaacagacattgagttcagcagctacagagttcaactgcaaatggaggcagggctgcatgaccaggccaacaacgagggtgctattcctgcagagggcagcagtgaggacccagaagtcactcaaacactcctatgcagaaaccaggcccccttccaccaatgccacaggcacaagaagctcttgcatcccaactgggtagataactcttgactcagaagttccctgaaatgagccattttaaaggaaaggagactaaatgtatctggagagactaggatatgatgtatttccctgttacccactggagtcagaacttacgaggaaaatcagagtagccagagaaaatgaagacttcaacattttctttacatgtctgagcatagtgtgagtaaattttcaactctgcaacataccctggccccactctatctgctctcaacttgtagccacagtgggttttgaaaatgaacattgaattatacagtacaggttgtgaaaacccttcccatgtcttcctttgcccattggatagtgatcaaaatcctcactgtggctaacaagcccttcataatcaggcactcctttcctctccatgaccacctcctgccttgcctagctcctctgtcactccagggccctggtcatcatggtctcctcagtttcttgagctaacattctctcaacacaaaatgctatctccaaagctcctccctcactccaaattctattcatcattcaggttggaactcagctatttctttcttagataagcctttcctgaccaggattttcatctctgaaaaattcttggttatgcaaactaattttctgagtgtaggaattctcagagcctttactatgctactgtgaatctccaagaaggagaatgaagccggcacagtctcctaaacctatttgcctggggtacaattttctccatctcactgaattgctatctgcaagaaatcatttggtaattgctgacttatgagattcacaggaccaagaatcatgtctctttgaagaccaaagcataactaaaagtagtaaagcttcttggaaaagagaagatatactatgcctatcaaggggagaaactgttgaatttgttttgagaaggtgctaaggcagtcatatagcagagaagagaagaaaaaagaataacttgtgtgtccattggtactgtcaagaagatctagaggtgagtgtaggaacttgccctgtgtagggcactcatgatctctccactgggcaaggtcctccacccaattccttggcccatggttgcggcctgagctccaagcaccacaggctgcattagaattggttccaatccagggagatcagccagtgtcattcgtgagaagtcaacagcagcttttctggcagccagaagaaagaggccacaagaaaagaaagtgatccagaatggggcagaaagtgaagtgaaagcagctggtcttctctgctcccatttgggaagactggatggaaagggcttagctctgagacacagatgccatcattctgcataagcaaaataagtacatctatgaacaagagcagaagtatgagaacacttcacaacagaagatttatggcattatccacaaggagcaaacgtcactgtaagtcagatgtgtttgaatcccattcaagggaatttaataactgagatgtcaaagaaccttattagaaggcaatcttacctatgtgatcctctgacctggacctcaaggatcatctacagtgatgtgccaagatatttgagctgggggggtgaaaaagaacttctggcaacacagcttaatgaatggattctttggcccagagaagttgctgaagtagtaaaatgagacgcagtccaacaaaaattaggttacacatgagaaagatcttgataaaatatagcccttctccagaaaaactacattattttctattagatgggatagaccacataacctgtgcagctttatcatctgaggtcttaggtcatttggggacaactgaagtttgaacaagaggagccaggcattctgcacgtgagtgaagacttacctggaggttattggtggagaagccaagcctctcctcctgttcataagaaactacacagagaggcaggtgactggggatcaattgacaaaatggcaatctccaatagccaatactctcagaatgatgttatgattgacagagcaaaatttccagggtagaatgagaaagctcgggccatcctctacccaaaccgagatgtggaccacatctctgttctcttagccactgccttttcctcaatgtttttgtttacaaatggtcacagcagatagactctcaccaaaataaatgaatcacaaagctaatagtaagtctggggacagtcatagcccagctcactgtgttacctgggcttgaatgtcagtacgggctattagaagacctttctagggctccaaatgataaaaatagtgctgttttagatgactgctctggtcaaggaacattgctttggccattcaggttagaaatagccaggtgtgggaaggactcagtgaacagaacagactccaaggtggaaagaggaatcttttttaaggcatgcacatagactgacaaagggaaaaaagaaatcgggaagaaaggttttgtgaaagacttttttccttcttatttcatatccaggatctaaggcctagtactggccagaaggctgaagtcagcagttacgtgtcctcaggtggttctgagataagagcagaaggagtggataatgggggcggggggggggggtgccaggggaattgtaagactgggtcattcttggcttgaacctaagagggtttccctttaggtattatcctgaagaaagctccaggcaaccttaggctgattcttcacttgtcacttctaaaaggtgaatcagttaacgcttacaatgactgactctgtcctactgttcaggttcacacgcaccttctaattataagaaacaggcttcttgggcttctccaggcaaaaactgagaggaagccaacattatttttgctgttactgcaacatccaaataactttgcatctgctggagcctccaattaaaagggcaatgatgatgagtcaatgcaccccactggcatgggccatcctttacttatgtttcagaaacaatcactgctccattttctgtattaagaggtgagagagaaatgagccatatggaataggagttggcccgagagacaagatacctgggttatggcctgaccatgcttttaaacagatgaatggccatatgcaaaacaacttatcccatctggagtcctattctgccctcccatccccatactcctttttttaaagacagggtctcactttgttggcctggctggagtgcagtagcacaatcatagctcactgcagcctctaactcctgggctcaagcaatcctcccccctcagcctcctgagtagttggaaaccacaggctcacaccaccacacccagataattatttatttatttatttattttagagacagggtcttgctatgttccccaggctgacctcaaactcctgggctcaagcaatcctcccacctcagcctgctaagttgcccagattacaggcacgagccactacactcagcctatttcccatttataaaatacagaaaggttctgtgaaaataagaatggcaagagcatagaaatcactttggataaagtactcgatcagaatgatttcaagatgtagaggaagacatactaagaatgcaaaatggaattacaccttggatttttagactgaattttaaaactatgaagaaagtgtcactgcaacttcagcagaagtgccagagaatgaactgagatgattcaaaacagatcaactttaagatttggtgcagaaaatgatctccacatatccaaaggcactttgggcaagcctgaagcagatgctggggcaggtttcatagtgactaaacgcatcaacatcaaaagaatctccatctgtaaatcactccacgtgaattatttgttacagcttgagtagtaaccacatattacattcaggttagaatgttactctgtctcactccccatctttctaaaaggatctaagagagacctaggtgttcagaaccaggaatttaataacatctttgacagaatatccaagagttcttcaaaagaaccaaaggtttcccttgacttgactgaacattgctagacttccaaagggacaactgctagtcaataactaaataagcatttttagaagaggatagcttctaccttcctattggggtgagggataatgaggactgcaatctggctaatgttgatcattaacaacagcagggcattccttaagtggtttctccgaggcagtctggggcagctggttaagaaatcttgcatcttccagccagagtccatggactagtcacgcttgatcactaaaagggctttacatatcatgggagctttgatgaaaataaatagacctcctaaagatggacatggagatccagaggtaccttgctttcaacttccttcattcattcttccttggttatatcaaaattgcatatcctttaccaggcacaatgttgtacacctgtaatcccagctgggaggctgaggtggaaggattgcttgagcctagaagtttgataccagctgaggtaacatagcaaaatcccatcttaaaaaaaaaaaaaaaaaaaacagaaagaaaaaaagaaaaggctgggcagggtggctcatgcctgtaatcccagaactctgtgaggctgaggcagatagatcacttaaggtcaggagttcgagaccagcctggccaacatggtgaaaccccgtttctactaaaaatacaaaaattagccaggcatagtagtaggtgcctgtaatcccagctgctcagggggctgaggcaggagaatcgcttgaacctaggagatagaggttgcagtgagccgagattgcgccactgcactccagcctgggcaacagagtgagattctgtcccaaagccaaaaaaaagaaagaaagaaagaaagaaagaaagaaagaaatgcctgctgtaatggggttgcaaaaacaaaatctcaaaatgctgtagaaaaattatgtcatttgtgttttagtcattagatgtccatagattattcaagaataaatattaatacaaaaaattgcatgttaccaaaatgagttcttgtgttccaaataatttgcatggcatgacaaataaattattggcctggtttctaaaatgtggtagttgttttgttttttaccctgatagtgcagaagaagagtccctttgtgttcttttgccagccaccaaagggctggctatcgtcatggttattatcaccagacatgggggcaacatgggaagaaggggttggcacatttttctaggagtaagggcatttggaaactccatggtgggtcccaatggcacaaaggctcttgtgtatggtactactttacaagaaagtctcagccaattcctcagcagctgtgaagttgtcagccgtggcgttctttacaaagctgggtggctgcttactgctgacatgtttggttttgagctctgaaaaaaaaaaaaagcctcactggaatgttgagctaggcaaagacagcagatgcccacaatgaaaaaagcccattgtacatcaggtgcttaggaagtttctggaaactattgacaaaacatgggtatttttctactaagtttgcacttagccatttcagttgtttttcatcaaaatctctcaacttccccctcctgtacttgacagccagattagagatgatccaataggctattgatcatactttcttctaaaggtcatactgggggggagcataaatgctcaagaaaccacacacttctccaagtaagaggcacattttatttgccttcctatttaacctcatatgggcttttattaataccaaaactcagaaacgtcttggaaatgtccacgtgaggtttggtatagggatcattttctgagattttctcaatttgagggtcgactcaaaagaaaggacaaaatatgtgtgacaatcttcctagatgttagtctaagcaaagactacttaacagcatatttcagtatcttctaatggaagaaaaacagtctcccttcgaggaggttgcaacaccagttcctgggactagatcttgccacaactgtgtctatttaggttgtaatgacctgaaaaaacctaaatgtatggctactgtggttattatacaggtgcctggcaataaaatactacgccttagcaaatgaagagacataggaggtgaagaaaggtcaaaaaaaaaacacagatgagaaatcaatgtcaaaagaggtcactttatgagcttcaaaggaagctacggtcattgattataatatcactgaaacaacacaggccctgtgagatctgaaattacatttccagtctgaatttatagaactcactgcagactctggttgtgattgtagcacattaatgggggcctaccaagtaagcatgatttagatgggcacaggcagaggtgaattcagtttttcctgggtttagatgactaggtgtgcgatcaagaaaagttcagaataggtttcttctgcaatttaagggacattgctggtaacagttaggggctagaacaaactttcaaaaacacaaatctaattatgtcagtgtcttgcttacaaaccaccaatagccctttttttcatgcatgatgaggtttagaatccttagacaataggcaaggcctttctggtgaggtgttgtgctgaacccctattaacctcaaagggaaagcatgaggttcaaggggtagaagaagagactcagagccaataaacaagatgtggggtttcattagggaattatagaggggagagagtccagtggtggctggctgtacaggagaaccaccttatatacagaaacagtccagtggcagtgagctgcacaagatattcactttcctacagtccagtggcaggttgggcaggaaaaaaactgcaaccacttgcaaacagtatgcactttatataacatttccacttaacaccctccccttaatgccctccacctggcaaccttcatgtaccccaaaaccagggcttcaaccccctgtacagccatgggataggctggggctcagatgttcctcatagacaaagaatgaatctccaggttggccacttctggattccctcctcagatatgtctgccacacagggtcattctaagggtatgcctaagttattgctctcaggtacatttacactacatgaggccaccagagtctccttttcagatcatctgagtctccaactatactaaaattctttcagttttccacatccactgtcctcttccccacacccagatgtctatacaattcttttctggctgcaatgccctctcttttctagtaaaatattccttcattctttccttgtcccttttccttttcatagtagatcctaggctcaccaaactgtatctccttttctccttgggtacacagctacactgcccttcccagcttcccttgctgtcaggtaggtctacatgatggaactctggccaatggaacatgggtgaaaattatatttaacatttctggtccctaaaatccttttttgagatcctccatgttctctttctcccagtgattccaattctgaggcccttgggagtggccttgggtacctgaataactacttggagcagaaaagcctactcaccaaaccctgcaatccatgttagactgtggcgtaagtgagaaatactttaagacaccaaaaggattagggtgtttgttagctagtctactttggccaatacactcaaccagatattattaattacattttacttattgtctttgtggttatttttataggtcaccatatatttatttctggaagaagtctgggtataaatagaaactcatgtttattaaaggaaagaatttatactaaaacaaatgcaaaagtatgcaagactttttccacttctgggctgactggctgagttgtctagaacatggtgccattgatattgtgttgaggggtccagaagaaagcccttctgtgggcccaggctacattcctttctcctgagctgctgtttctcagatgtatgccaccaaacataaaggacacaatttacaatactatgagggtagggggaattctggaaagattctggccatgacggcagcatagtttttcaatcctttgactactacacaaatagagcaactagataacaaaaccccaaatccctgacaacatttaaaactaaactaggagacaaagtttcctcttgaaccccaaaataccagttaatggggcaaaccaccaactgccagaaattctgcatggaatcagcacctgggtgggaagaagaaggaaacattgggtatcgatggacctgagaacaagagaacccagaagagctaatagtactcactggagagttcaatgggccactgtgaaacaacagctctcactgggaggggttttatcctctttaccatctgagtacaaggggcacatgggaaggaggactgagggagatggagcagtttactccccatgaagtgtgcagccacttggcacccttccagcgtaagcccccaccagtgagaaactactgagagtggcttcacatttgagccatatggaacaagagtctaaagaaagagaaagtcttgaccaaagtggttgaggagaaaacagccggggaatctcaggaagcatctaccatatctaccatatttttaaaatgctacacacacatgaaaaggaagttctgtgacgttagtgagatttcctgaatcatacctcattctaaaatgtcagaaaaaattaagttcacataaaaatgaacaatggaatagtatcaaggtcaaggtcaaatcccatagaaagtgattataattacaaaatagaataaggagcagaatagcatcttataaaagcatgctgaaagctgttacctataatttcaaaagaaacttaaagacattaagaaatgatacaaactaccaaagaacatgaccatctgattagaaaagctcataaatagggagacaggactgaaaaaaatgattataaataaaagaaaaactcacttcagaaatgtcaactaaactagaaaaaaataaacagaacagataatctaataataaatataaaaggtgaaaaggaggaaaactgaaaactctgaaagcaataaagagataaaaaggatttaagacaagcttgtccaactcacagcctgtgggctgcatgtggcccagaatgactttgaatgtggcccaacacaaattgataaactttctgaaaacactatgagattttgtttgtttttagctccatcggctatcattagtgttagtgtattttatgtgtggcccaagataaatcttcttccaacgtggcccagggaagccaaaagattggacaccactgaattaagagaaaaaataataatgaacataggcaaagaaaattgaacatatggataaccagagattataagtaagaaaagcgagggaagagaagaaatactaataactataattcaagaaaatgtcctgaagtacaaaaaaattgaaatgatattgaaaagctgtgccacatatctgaaaatactgacccaaaaaagaccaatagcaagacatattctagtaaactctctgagtttctgagcaaaaagaatacatggcttatagtataaagaaaattaaactatcatcagactttctaacgcaaacgctttaggctagaagaaaatagagtagcctgcttaatatgctagaaaaaagaaaggggttttatatccagcaaaactgacttgcaagtatgaaggactcaaacaaattgttatgaatatggacaagaacttagagaatattgtttccataagtcctttctgagtagcatatttgagaatgagcttccgatgatcaaaataattagagagaacatcagcataaggactggcagtgaatattaagtatatagttacttgtggacttaagtttaaaggggactaacagagagcagagtatctgacgtctctatgctctgacaatgtaaatagagcacaactatttaaaaatgaaggaaggtgggacaaccatatgcaaaaaattgttgtaatgttttcaataaccacattagtactagtattagtattgtcctcctgagattactgtgcatataatatgtgataaaacaatgattactattagaatattattattctattattccctgtgtccttgagggtccagatattttgggaaggaaggcgatctaactgtaatgcagaagaggctaaataaaactcggtaaatttgaattggagtactaataagaactcataagttcataaaacataatacaataaactatagatattataatgtaaatatagaataaactatataaaatataagataatataaactaataaaaactataagtaaaatataaaactataaaataataaaaattataagctataaaataataaaaatatatgaataaacaaaataaattatagcatattatagaataactatagtatactatataataatatactatatatccacagggatcaaacctgagtgtgatccagtcccagatgccaatttacaagaaatgcaggggacagaggaacatattaaactgcactgtgagcctgaactcaggctcaggtgaactatactagttactacattactattatataataattatgatatactatataataaccatggttattatataataaagtaagctatagtgtaactatagtatataactacatatagtttattagtttacatagtttttataagtctccccaattctaccctttacaaatgttaagaaacaatgaccaacccagtaccaacgcgcatccctagcatctagattgtagtcttcaaataatatttcttacccaaagaaagcagagcttcttggagaaactgctgatttcaggtctaggagaggaaatttatagatatgcctgaagagtcttaaattgctccatggcaggagagctatcaaaggcttttaaggctatgacaaaaggactcaagaaccaacttgctgttgcccctgctggctaacgtggaactgtttgaacttcaataatgattgtagtctttccaaccaccacctatagtcttgccaaagggatcaaacctgagtccagtcccaggtaccaatttgcaggaaatacagggggcagagggacatatcaaactgcactgtgagtacataatatatacaactcaggctcagaagaactatacaggtcaaatggctctggaccctcaatagataaattgtaaggaaataaaaggaattaaggaggaacttaatgattaaaagaggattcaagggcttgtcattttttaaatgggaaagactagactagagtgtttgaggatgcacactgggtgacaaatgtattttttaaaaatacaaagaaattattattacagtagtatcatgattacttatgaagaatacaaaggattataattgggtaaagcacatgaaggggttttgggggtggcaaaaattctatctcttgtcctggccggcatacaatacgtatataatatgcatatatatgtatatacttatgcaacattaatacaatatataaacatacaatatactagccatgcattgtattcatgtggatttctctatttgtgttttaattacaaaaatatatatatttttaaaagactatgagtttctcactgccatccaatctcctactgagaagacagtataaagcacatggttgaagtggaaaataatgttagcaaatcatgattgaagtcatattgtgaaggttcacaaatatctttgcaaagttatatttaatttggaagataatgtagactctcttaaaagatttcatgagtccagcaactccccctttcctctgaacttcttgatgtctccaccatttacttgattctcctatttggataattaagatgagagagccaaagaaatatgatgcaaaataaacccttgctatacaagtagtgtcaggcaggtgaagagtgatgggttggtgccacgttcctggattcagccaccttaaccctgtttattgtgatttaatagaaatccactcactgtgccatgcatataaaatgaagtttatcctaagatttttgccttttcaagcatctaaattcctcagtttctcagagaataggccaggacccagaagaaaaaagtcaactttgagtaataaaatcaaaatgatattgaacactagatagatagatagatagatagatagatagatagatagatagaaaaaagggaataaatgcctctgagaattcctagtgcctgaaagctcaaaacaaatgtacaggaatcttcttgagattgtggagaagatattccttagaaataactactttatatccattattctattttgaaatatatcaaactttcatgggtagtcttttttttttagtatgttaaatatttttagtgaccacaaaatataatcataagggatcttatggatttgtgcttttttccccccaaaaaaagtcttaagttcttccattccaaattatctatccagggggattttcaggagttaacaatgtgtaaaatgttccttgttcaagacaaagacaaaaatgaagctttttaaattgcccttgtcacagttaggataaaacaacctccctatcaccagagcatgattcaaccccctattaccgaagcattaccttcccaattcctttagaaagaggtggagtttgaaatcgcaaatagataacaaaatttaagcccccaaagagagagagaatatgtatcaaaatagctaaatgcatgtaaataagtactaaatttaacaggcatgagtaatgcaaacctcacaggagccatcttgcctaggactgctttcacgcttccaattcaaaggatataaatgagctccccccacacttaaatatggaataaaaagacagttgcaccggactatagaagaggtaagcccaaattcacagaggttttattaaaaacaggaaaaggtcagtcctcttcccccaaaggaatgtccagggcttgtaggaattattactccaagatagtttctttattaaatttgctgtgcagaaatagaaaaacaaggccaggggagaactagaaagacacagaatgtcttacttttgtccagcctaagcactgccacaatctaaatttaatgccaagatacctcctcttcactgtatctataaatcagatacatgtaaaaacctagagtaaatccttaatgaactaagaaattatgcaattaaacaatccactaatgataaatatgtcatctatgtgctttcctcaaaataaaacaaataagataaattcagagtattgtcccagatataacatctgcaaaaaacctccctgctcaccaatgacatgaaacagccatctacattttaacctatgtttgcttctagttaaaatcaagcattcgttaatgaattagtttgagtgaatttatagattgagggcagcccagcactgccttgtttagcaaacatttttcaacatgggcagtcacagggaaatctcaagcccaagttaagtgccaacttaaaatggattcccgagacacccctggcgtgtgaattaattctatttgtattaatatttggaatgtcacgcaggatgccgcagctggttttgcatgacactctggcactctctccacagcatttttatcattaaaatgaccatgttttaaaagcaatgacataccgtgtgagagactttataagagtgagaaggatgaaaagctggaaatttctctattggcctctgcctattaaacaccctacctttacaacagcaggacacattttggtgtcaaagaacagggcactgtattcaatttcggtgcagtgaggggtttgagtaatcctgtctctttacatttgagatcacagcacttctagaaaagtcaacagaatcagctgctccaaaataatgtccacaagtcaggcatactcacacaaaaatactccttgtgaggaggtaagaaattaaaataacatctggcagagaaaaatctgttctcaagagctaaaaccaaagaggagtgtcagagcttgaggtcttctctttggaaagcctctgcaaccagcactactggttttgtggcaacaagacagagccagtttagatcagtgaaaactaggtacaaacgaatacctcccttcagtctacagtttcaaatgtttcttaacatcaaacacttttacggcttggaaatgaaaacatcacctggtttgggttgtatttctttcccttccaggattctggtgaagatggcaataaaactaatatggctacagagagcaggaagaatcatgaaaacaaggataaggtgcacgctacttcatcagctcttaatcaagaaggaactctagtatgtacctatgtgaccagctgttttctatctccgttgagatttaacagcaggatccattctaggagaatatctgatctgggacttcggggttttatatattgttacccttcccctcctcctcctcctccctatttaatgggttctagaaaaagcataggagattgcagtttcagcagacagggaaaagagggctgatatgctttacatagttatttttatatttaatccaagagcaagagaggactaagcaacccagctgactctaaaaagcattttaggaagttggcaaccgaacaagccacctcctgctatctcctactgtgaagtaactgtatccagggtatagatatgttcctcaaagatatcaatagcacagataattaagttagtgcagcaaactagctacatgctttgaagtgtggagacagttggtacgctaacctttccctcacctgataggctaagcctacaatctcctcacacgtgttaacaatctcgtgacctttagtctgtcctcattatcacatcagttaggttacccaaccacgtggggcctaccataaaaaagggctgcttataaactgggatagtgagttaacaggctcaaagacagactccacctgggtaggaagaccctccaactagagaagctaaaactctctagattaagctatcctgaggcagaagagaaagagcaccacagggtgggaagagggaccagctgacccagacattatcaaactctggaatacatcagaatcataagaggtgtttctaagtataccagttactggatgcaaccctctagagagtcttactcaaagcattggggtagagacataaaatctgcgttttaatgagtataatggtgattcaaactttgtggttctcagactacacttcttggaaaggtaaggactgaagcaagtttctcaggactccagtagtatgcacctattatccagaaactactaaaccctgtggtgctttatatattttatgtcatttaatcttcaccatataaacacacacaataaataggtgtgtgtatatatacacaataaatagatatatacacaccctatatacatatatatttgtaaaatacacaaagcacaagggtttagtatatgtgtgtgtttttcattaatcttcacaacatacatatatatgttgcatgtatatatacacgttgtatagatgtatgtatataggtatatattgtatgtgtatatatgttgtatgtacattacacacatatgtgttatgtgtatatatacatatatgtatgtatatatgtatgttgtgaagattaaatgatatgtatatatgtgcgtatatataagtacatatatgtatgttgtgaagagtaaatgatgaaaaatatacacacacatatatataatttgattcattttataaccacagaaactgaggctgaatgatgctaagtaacttgatccacagtcacatgctaataagcggcaaagccatgtgcagaacccagatgtgcccctaccaaatggacccacagagcaccatggagagaagtctcaaagaagctgcagtccttcctgatgtgttttaattcacctgcttttcaggccttccctccacagaagacaagagtgaatgaggccaggagattgagaaaagcgtgcagctaacaggtacaaaatatcagaagttgtccaaaatacaggcattccttaccaagtgtattacaacttgcactaataaatttcaagtagatatcagcccttaggcacagagaagcccgctatgagtaaatgaaatatggctgtcctctgaatcagaaggggataaaggacatgtgaaatgggtctctttctattccactctctaccctaccctggttatgctagaccctgaataaactccctaaacctcaatatatcctgactgggttttactctgggcttttaatgaggaaggagtagggacaaaaagaagaagaaaaagaaattatagtccctcctataatgccccaaaacaaatgtgagaatgccacattttcctgactcaagtaccaggcttggggactctatagctccttgacgggaagccctgttatattaagaaaaaggcagaggtgtttcaactgctactagaaagataaatagcctaggatatccattaatgccccataaattctgctgctcagaatgctgatatatttctagtgatttgtgatgttttcctttccagcttttgatggcaacttaggtttcatacaatagactggtttggcaaaggtaaaatgtctagctatgacaaacttaattccctagactcaaaaccctcagcaggtgtgaaaacagcaaatctagttaacttcccaattcccatagaaatctccactgggaatatgactttcgatgtggcatttctaggggaaattctgttgttaaaggtgttcttggagaatctcccatgaggcttgcttagagaaattttacccatttctctttcaaacatgaggtttcagtggatctgacccactctgatgatgaaatctaaaaggagagcctcatctctcttctgaaaatgctgggaaggaggcttagagaacagtcaactaaaaggtgacagccacaggtgggagtgaccacttcatatttacaagactgagccacactggatactgtctgccatttacacacaacctgaagaccagttcagtcccatatggtttttggagaggaaaagacagacatgcatgggatcagctgcagaactggcaaagagagagttacacaatagttttctttttctccctctagaagcaaatataaacctactttatgatggcagtcctcgtttcccagagaagcacttttgcaataataacaccatagaataaaagcttgagcgaccaggggcatttagaaaaataaagccttcccgcttccaagtattgtgttgtcattgccctgttccttacattttctatcaggagctcaccatattcctacatactccaagaccgaagtgcacagtcattgtccctccccagtggcgttgctttgaggaatagctgaattatcatgtggacagtcactctgaacagtgtctggtacatttagtaagctctctataagtcgtggctatcgctactgttgtgctggtgttgttaaatgtggctcaattagccacaacatacatattacatgccaaatatttttaaagcaaatatgtggcttgtttgtagttttcatctgtattctatatcccatggggagaattcctttttcttttctttttttttttttttttgagacggagtctcgctctgtcgcccaggctggagtgcagtggcgcgatctcggctcacttcaagctccgcctcccgggttcacgccattctcctgcctcagcctcccgagtagctgggactacaggtgcccactaattttttgtatttttagtagagacgggatttcaccgtgttagccaggatggtctcgatctcctgacctcgtgatccacctgcctcggcctcccagagtgctgggattacaggcgttagccactgagcctggcctcccatggggagaattctaatcatgaaagcagccatttaaaaaggatgaaaatatttaagctacctactttctctcttaccttttaaactttgtaagtgtctagagcagggcttctcggcctaggcactgttgacatttggggctggacaattctttgctgtgtggggggatgccctgtggactgcatgatgtttaccagcatccctgggctctattcactagatgccagtggcaccctcttccagtcttaataatcccaaatctctccagacattgccaaaatgtctttgggggacaaaattgcccctaactgagaaccactagtctgagccattttgaaatagatgaatgaactacagacgtaagttctctaaaatgtgcctcgaatgtgagatggtatgctctcaccaaggatttcacttacaccacaaatagcattttactagaagtaaactgaaacccattgcctaacaggaacagtgagatgcttggcactaacaagttacggtgagcaaaatagtctaaacttgttcacatatgcaaactcaacatttaattttctgcaagattacccacaataattacaaagtttctatactatagccttaaaagcttggaactatgagatccataagaattgatcctttatcttttacctttactgtgtactgtgtctgtgcaacatagcaaatgaatgtaggcaatattttcttctaatttctaggagtactaaagtgaaactttcctaaaattaaattgattattaaataatccaatggagggaaatacagagtcaactcgaatgtacaaacaacactaaggtaaaccaaagaccattttgcttataagcatgtatccttcaactgaacatagatagctgttgcacatatgataactaatagcttgacactctaaaagtaatgttgaaatattagttgctgccagttaatgatggtttgaggacaaacagttgacatctatatgacaccagtttgttcagtctgccagtaacatacagtatttttgaggcattagtaatagattgaataaactatctacctggaatctatggtcaaatgctggctaatgccatatcaacttgaagatttcagagccattatcataagacataattcctttgtcatagtcttagaattaacccaggccaagaaatccaagctaatacacagagctgtattaggatcttacttaactgatattaatagagttcatgtgagagaagacacacattcattttttcaccttctgataaccacatgactaataaagtctcatttcaaaggggaaaaaaaaccccacaacactgacacccacattttggcaaagtatcaagccaattcccctaagggtattagtcgctttgatgaaagaatgttgcaccatctccacacacactagatctcatttggttgttccttctctttctaagatgatgttactgacagggattactctcttattacatggtaaagtgggtaggactgcagacaaacacgggacctaagtttgcaagtacaaggtcatttctctctgcatagagctacctcaattccatcttctgaggagcagagattgcaatttccatgctaccacgtgatctcacaatgacaggaaagcctgaggacccaggaggaaaaataagtgatatgcatcctatgtgagccttcaggagccgctgtgcccttccctgtctcctttctttaattcttcaattgaggaccaagtcagaatccttgcaccatctggtagccatggataccacactcaatacacaatatgatcttaggagtcttttttttttttttaacatctccaggggcgtttaatccccttcctaactttcttcatacttaatctccagtcctctcctgcaccaaccctcttccaagactggaatctctaagaggtgaaatcaacctagatctagatgtcagaaaaccaatctctagtcttcggctatatttttttaacaagccgtgtcactctgaacaagccacataatcttgctaagttcactcagctgtaaaagacaggtaagttgtgacttcataaactttcactacaaaaatatcatgtattattagaagaaatacatcgagaaaaacagtagaagggagtcgttttgcatgttatttagtggaaacgataagaaaactatcatctaatcaacaagcacaattactctcaagcagttttactcagagctggtcacatgaccttctgaagaaaaaggtaaaaagcaatcactttttccgccttccaatcattcttctcccttctagcattaaaatactccaatccctaactttaatccttcccctccacgtccagcatttaaaaagaataattgggcagttcccagtattttcccaagaagtaccttagggcctttgactagtggtctaacttcagagattacacctatgatggttaatactgagtgtcaacttgattggattcaaggatgcaaagtatttatcctgggtgtgtctatcagggtgttgccaaaggaaattaacatttgagtcagtggactgggaaaggctgacccatccttaatctgtttgggtaccatctaatcagctgtcagcgtagctagaatataaagaaggcagaaaaacatgaaaatactagactggcctagcctcccagtctacatctttcttccgtggtggatccttcctgccctcgaacatctgactccaagttcttcaattttgggactggaactggctatccttgctcctcagcttgtagatagcctattgcgggaccttgtgatcatgtgagttaatacttagtaaactaccctttgtatatatataataaagtgtatgtatatagatagatagacagatatagaaatatatatatatatacatatatatagatagcacctattagttctgtccctctagagaaccctaatacaataattaaactgacttaagaaggttgcctaaccttgactttaaccttggaaatacaaggacttttcatcttcctctttccactctgacttatattgcatctcatttctcatacaacagtctagggcctctcctctttttctggtcccctatgcttaccaaaacccacatcttcaaaacaaacatgcaaagcaggaagtacctctcagaagggaattccgtctgctctacagagtgccagtcggccacatcacagaagcagcaggcaactctctagggaagacaccatagtgtctggtggactccaggaagctacagcacaagaaggcacaggattccctccaggccccagcctggattctaagaaaaaaaataatgttgtaaatcacaaccctcacatcattccttaaagaccagatgatggtgtcccagactcaaaggcaatagcaaaacctacaaaaaatggtcacctatttccatttcccaggaagaccctcattatatacaaagatgtgactctcctccatccacatgtccccaagttcctataagttgattctaattggaagagatcaccaaagtagagagaaaaatctttctggggcaagggtccaggaagtgggggtaaaatgcagagaatgactctcattttggctgtaagttgaggtgatcttagggaaactacataactcagtttcttcatctgtaaaattaggaagaatgtggcttatttagttcacaatactttaaaatatcaattaagagaagtaaaagctattttaaaataaaaatcatcaaatagtattaaactcctagtattctaatatagattaatctaatttatgtctatatttgcaaaagtacaacaggagtttagaaaatctccaaagttaatttttttttttttgagatggagtctcacactatcgcccaggctggagtgcagtggtgtgatcttggctcactgcaacctatgcttcccaggttcaagcgattctcctgcctcagcctcccagtagctgggattataggcatgtgccaccaggtctggctaatttttgtgttttcagtagagacaaggtttcaccacattggccaggttggtctcgaacccctgacctcaggttatccaccccactttggcctcccaaagtgctggcatgacaggcgtaagccaccactccagaccaatgttaaaatctggaaaagtaaaataatgcttttaacattgtttgtcctcacataaatgtacctatacttctctccatgcctctttctgtgtctatatttttacatgaatctctgtctcaaaagatagcaaaatagagtagaagagttcacttgattcgaaggtaaaataccacaatgtaaatctcaattccactatttctagctgtgttaccttggacaaaataatgtctgaaatggaaatgatgatcccagacactctacttccagaactggtgacctgttaaatgagagccacctacttctgcctttctctttctttccttctctccactttctcttcttcctcctcctctttcttctcctcattgtcccattattcttgtccaccactgccatttcttcttctccataagacagaattaaatttgagttctgtgatatttctgtgattattaaatagcaaaattaaattgctttttattgtgattgccttccatgtttctgctatgagacttttgaataccctagaataaatgcagttatgtattgggtctctccttcattgcaaaaaaacaaaaaacaaacaaacaaacaaaaacacctttcccacaagccctgcaaattttctctaacttaatgaagcaatatgtatatatgtagggaagtttatgaatttgaggcttggctctgtcacttattagtctgtgtgaacttgggcaagtttcattttgggggctcaattttctcatgtataagataggggtaaaaatatctatctgataagagtaatgagagaattatatcaattaagatactggtaaaacacatagcctaatgcctggttacatggtaagtgaacagtaaggagcagatactattatgtgaaaactaaaaatcagttttatatattaatggcaccttgactaacttcaatattggcaatttgtagggagaatttcaaaataggatgttgccccatcaaatagcttggagacaaaaacctccaataatgtctaatagtcactgaatgcttactgtatgccagacattttcttggtaatctacatgtgttcattcatttcatcctcaaaacaatctgatgaagtgggtataactattattccaatttcagatgaggaaagagagatgaagagtagttcagttacttccctaggtcatcgcagatacatgagccagaattcaaacccctggggtctagttctagagctatgatgtaaagcattttccaaaatcatcttcctccaggaaagatggcatcttctaaaccaactggtatgttgccagtaatttgttaccagtaataaagtactggagcctgctgatgattttctttttaatttaaatgggtgcagttgcacttataatgtaattattgatgttcagtaacattctgatttcctctctagtgtagaaaagcagtgcaatccaagctaaagctctggaattactcagagtccagtgctcatctgcagtatgtgcatgtcacccgtcagcatcagcatctctgtcatcaccaccacagttatcatcaccaccatcgtattattatatattgatcactctatgccagggatgtggtgattcttcacatatgttttctgtatgtgttacagcagaagaaaatgttgaaaaccactgagctacactattccagaggcatacttataagacttttctcataattctaccatataccactgacctgaagagggaaagaagagtacaataatattactggtatttattttgtgttaatcactggaataggcattttaaatatataatcttatttaatcctcaaaataggcctaaaatatagacattatagttattttaaccccagctttacaacaaagggaaccactgctcagaatggctaagcatctttcccaaggattgcggaattttgaaattacagcttcaggatttgaaccagacctataatgattcttttgagcagtccctttaagatagttttactattttctaaactgggggtgtgtgtgttttttctcctatgacacgagctgtctcttctgttatctatttattagaaagcagaagccctcaacaaagttctagattgggaatctgaaatcgcaagccatagccctggttttgcagctcatgtgttgtgtgggcaacttatttatctattaaaatgaggaatttcatctctagcctgctacttgctatgatttccctagaaaaacatgacaaatacccattgtcattcatatgatatccagtcatatgatatctcccaagggcatgttctctgcccttgggaaagaagattgtagagagaagcccactgcactgatgtgcttgttgactggagcatcagacaagggtggttaaaaagaaggttggctgggaagtgtgagaaagtcatccaccttgcagctgtctctgcccgaatagtaccatggctaaataagagtctctctctagagatctctgctggcaccttgtcttcattcctttctggacaaaaaaaaaaaaaaaaaaaaaaaaaaaaaaaatcctcatgaagaatgtattgctttctacatgcaactgccaaaaacccaactgtaggcaaaatccatcttacagaatctcttaactgctttgattcagttcttaaaggagattagttgttggaaggtcacagagaagccatcctactgcacactgcagcttggagtttcaaagctttcactactaaggggatctccgtgcttgatgccccttctctccatgctgtttaatcaatgaatcaacaaatagttactgagcaaggcttccctagggtctgcaggtcacttcaaatgtggctctcctgttcaatagcaggagaaagaaaaacggatttttctgactcctcttaaagtttccatttataaaaccagggctggcatcaaaagactgtgggtctcctgtccctcttttttcatcccctgaaccctctgattcacaagtaaaaatgaaatgttatgtagctgggacaatatataagagctggaagggaggaaggaaagaaggaagaaagaaaaggagggagaaaacaaggaagaaaggaggaagagagaaagagaagtaaagaaaagagcgaaggaaaaaaggggagagaagagaagaagggagggacacgagagaagaatgaaagaatgagacccttagatttcaagaagggcaaaagacacagtgaacatgtagacaatactcccaagaaatatatctttggtagcatatacactccatacttactagtctgttcattattactgctttttagtatatatgattatctttgtgaacccctactttaaagcttttaggattagtgtaattatgaatgctttttttttttttttttgagacagagtctcacactgtcgcccgggctggtgtgcaatggcacaatctcggctcactgcaacctccacctcccaggttcaagcaattctcctgcctcagcctccccagtagctgagattacaggtgcccaccaccgtgcctggctaattttttgtatttttagtagagacagggtttcaccatattggcccggccagtctcaaactcctgacctcagatgatccacccactttggcctcccagagtgctgggattacaggcatgaaccaccgcgcccagccatgaatccctttaaatgtccctctgccttgaccctaccaatagaattacacataaaatgtgcatttagcctcaatacccacagtatcagaaatccaccccccccaaaaaaaaaaaaactcaactagtttttctaagtaatttgtatgaaaatttaaaaaataatgaatataaatattacttttggtttttaataacagtgttatatagggtaggtgcagtggctcatgcctgtaatcctagcactttgggaggccaaggtgggaggacagcttgagcctaggaactcgagaacaacctgggcaacaaagcaagacgccatgtctacaaaacatttaaaaaattgagcccaggagtttaaggcagcaataagctatgattgtgccactgcactccagcccgagcaacagagaaagaccccatctcaaaaaacatactttttaaaagtaaaacactatactatgttacaaaatgaatcaccatctcccaagtgatgaaagctactgtgatgtacagttgtcactatgacaggaccaaacaatggtgtgaatagtgtcctcctctgtgaagcacacagagcaggattctacttgatgatatttttcctcaatcaaaaatacagtcatctctcagtatccttggggattggttctgggactcctgcatataccgaagcctaaacatactcaagtcctgcaatcagccctgctgaacccacgtacacgaaaagtcagccctctggacatgggtttcacagcccacaaacactgtagttttgatcggtgttaggttgtaaaaaaatctacccacaagtggacttgcatggttcaaacccatgttgttcgagggtcaagataataatgaaaccagcaacagtttactggacacttactctgccagacacactgctgaatactttccatatgttatctcatgtaactctttcagccaacattggtatacattattaccctcactctacagatgagaatgtggaaggtcaggtaggtgaagtcacttggcctaaaaatattaaacatggttaggtccagagcaaaaccccaacccatgtctgactctgaatattatgcttcataatcaccctgtacctaacacttttagtcctatctttcagcttggagaatcaaggtgaggaaaagtaaaaacagcatatttttattatattttaccccaaactccacttatacttggtgttcccacactcgcttcaaattgctcctttcccccccccaacattaattactagagtctattcttttatatctttttgataaacatagctggtattagaatagaaaacacaccatgagatcacagtattaaccatgatattctgaaacatttttcagtctaagcatgcaataaggctctccaacatcttaaaaagattgattttaaaaaaagcttaaatataagcactatgttaacacttagcacttacagttctaaacaaagagtttgccagataaaatctggagtgtatgtagagggggttgatgcttttacattttattgagcttctaaattataaccctcatgctttttcatgtgctgattggttctattacagtagaggtattaatagaaaaatacacacctgaaattctatcattcagtatgacacctgtatatgtacaatgatgcatctattcagaagaatctatatgttaaaaggagttaaaagagccattatcttttgttccaggatgatgcaattatttataccatctgtatgtggaaggaagtatggctcaagaaaccagttcaggtctgtttcaccttgaagctcagcacacctagacagagtcctttgcttaaagtgcctgtggttccttgagactgtgactctgagcatcttcattcctgcatgcatgctgtgtactgactagatccacctccaaatctggataaagacacggctatgcttccaaatgtcccctttccccccagatttggctactagacattcctcacttagtttttaaaataagcatagcagataacagcacaccaaacaaaccacgaggttagcacttaacacaggtacaatttgctcatttttctcggttgaaggcaaatttatgaatacaatcattttcacacactgaaaccacctctaccagagaaatgcaaatattattgtgatatctggtcctcgtagaactcagaaaatatctgggtagatgaaaactctgaagttaggacacagcacttctcacagtatctgcatgtgcttattaccatatggcagaagttgtttctaaagcaaataacagttttcagaaagactgagtttacgaattaatctggagacagggagagagagagaaaagacagttgtaccatttaaaagctaaggaacgaaatgacctattcctcttatgtcaagacttgagaacttctagtacgcaattagcttgaccttccataaaggaagccctgaaatacagacttcctttttgtttctaaaataaaggtacttaccagtgaaaatccacaagtcaccacactttgcccagaatcacattggccgcccttctccatggaagcacagagtgggacctgccaagtttgtggagatacctacttgggttggttggaaataggtaaggggggaagaagggggagaaaataaagactttccctttaaaactgaacagaagctgataccaaatcacatgaccttttaccgtaatttctattaaaatcatttcatgtctggttgcctctgctctcctggctcatttgtattgtttacaacaagtcattgcactggcagttagtggtggctgaatccatggttacccgtttttacattcactagttaaatggaatgcagctctgctgtgggtttcagggagcaagctcttaagaaaccacaatccagctatcaatcagactaatctgagagaaattaatctcataaacataagtattgttgcatattaaaaattgatagaaagggggcatgggcttttattggttggagttaattggagttatgaaagtggacaagccgagatttgacttagagccttagagtgttcagtctgtggtctccatctgacagccattcacattgtgcacctaaaaagctttcaagggtaatacgaccacccttgaaaacaaatccaccactttccaaaattctgtgagcatttactgacctgaatgttcttagaatctaggtagtggctaaatacaggtttaaccagactgcaatcctagcgaagtaacttaaacagatatatacaagacagtaaaacaccaaacagacagcactgggtaggattcaattaagacaaaacctcagtggaatgctctttacgagtaaattaaaactgcaaactaatatgttttgagagcaagaacagtacaaattcattcttttgtccatgaatttatgtggttaattctttaaaaacattccccaaagctaacttgtttctcaagatggacatgaccaacaattacaattcctaataaaaatttagaagttttatagtttaatgcccacagtaattgtcccacaagtcacatctaaatgctaaatgagaacagcaaatagttaaagctaacatattacaaccccatctactgcaaagtcactgtatcagaagctagaattgatttgtttcctcagaacaaattgaaaatgaatgtaacataacgtcggaaaaatccctcctgcactgctaatcggatattgtataatggttgattgcagctttgccctgtactattgctgcctaaatcatacatacttacacgttctgggttcttccaagagtttggtgcagtttcaaggacaaatgtcttaaggaagcctctctactgtgcagcagggagcctggctcggatctgatgacaagagcacagtgctaaatctgacaacagagaaggaaacttcctgtgtgaagaggagatcttggaaagtctcagggttaaaaaggctgctttaaatgtgctggttgatttgctccctggttgtgtatacacagtagcagctgatctgtatttgcagccctgcagaaaggaacctttactgaaaaccaatggcatcacatttcagcagagctggtgccaagtgctggagagcagagcaacctttgacaacttcacacaattcaccccagcagactcaccacaggtcagaaaggaatgtggaaagtatctccccaccaggtttcatctcaggtatgttagcgcagtccctgggaaaccacacactgttactggctggattctgacaacagtgtaaggtattctcgggacttatacgtagttcctgtctctgctgtcctgacctacagtgtactatattttaacagaagctttaaaatgaatcaggattttttaaaatgcatttccctctgcttcttatagaaacctttgtatgtaaggttcctctgtttttcctcagaaataaactgaggacaaaataatgtaagatcgggtagtctggtatcaacctctgcattctgtctcccaatgcagaggctggagttttaacattactgtgttgtcaggggccattttagtattgttctttagaaactggggatggctgcaaaacttcactccaacagaaccaactgttgtaatgagctatagagatgttaggaacagacaagcaatgaagaacatgaaatattccactgtttagcagtggaatcaccttctttattatcatccttaacatagaagagagtgaaaattctagaccttaccaactgtagtagtgaaagttaagacagagtaagagacagagaaaaagagagagacagagacagaaggtaagggcggctgctagtggcagtaacaaatttaattcaagtcattggttaaccacttcattaactgtgagttcctcactgtccttcctttctcttctgtctctatgacaagtccaggttatggtatattatatggtatttttcactattgtgctttttatttcaaaggccagaaatcagaactgacagtttaacaaaagaccatgttaaatgtgtcaggtagcacgggagaatgttcccttacttatctgaaagccagcccaggagctgcctgggcaattggtgaattatccaaggtgtttgcttttcattttggccacactattgtttaggaataatgataattcccttacatctgagagtccacataatgtaatgaatagactctgggctctggtgccaagtagatctaacttcctatctctaccactttctacctacatgaggttggagtttgcttaaaaatctccgaacttctgtttcctcatctgtgaaatggagacactataactaccatacacaattttttgtgaagttttaaagaataacacatgtcaagggcttaccacagcgcctggcacgcatgcatttacaaacatttactgagcctcctctcagagccaggcacagtgccagacactgggggcacaaagtcaattaagacatggtctctaccctcaagtgcagttccacaagtgttacatatttcctccttccctcccataatttgtgcagtctctgtttaaatgctctgtttcatttgatccttccaacagtcctatgagatagatgaagctacacccagtttactaatgggaaaactttggcttgaaagtgagggtcacacagctggtaaattgcagcctaaacatcaatccaagctttctgattctgtcaagttctctttaagatatatataaatatatatgaattgaccacatagcattcatattttgcattattagatattatacttgctatcttcacagtgtcacgtatacatataatgcacttccctgcaggtagcatacgtcccttaaagagaggtactatatgttaaaattactttatattctcaaacaggcttagcatgatgttaaagatattacctgtttaataaattttcctaaattgaaaaaaactcaagttgggtcaattttactacccaaaatcgtcctcacagaaagctggaatccttcaataaatgatggtttggaggttatatgtggccttccagtgctcatgctgtctatgtcattacttccaactcattatatacatgtcaaagttcttaacactgactcatcatcaaactccctgaagattgttttcttcatttgtttagcacgtatcccgtacactgtagccctgatgaattctggtaaaagtgattaaatatttactttttaattcaagcctgacccgaagacatctcttgatttctgggtccactccagtttctagtgtttttttgtttgtttgtttgtttgtttgttttgtttttttggttttttttttttttttttttttttgagacagagtctcgctctgttgcccaggctggagtgcagtggcgccatcttggctcactgcaagcttcgcctcccgggttcacaccattctcctgcctcagcctccctagtagctgggactacaggcgcccgccatcatgaccagttaattttttgtatttttagtggagacggggtttcaccgtgttagccaggatggtctcaatctcctgacctcgtgatccgcccgcctcggcctgccaaagtgttgggattacaggcgtgagccaccgcgcctgaccccagtttctaggtttaacagttcacaaaagtgtagagttttgttgatcattatcttataaatcagagcacagtatccagcaatcttgggtagagtttgctttttatacatatataatctgtacaacagctcaaatttcttaaataattattgatctactgcttcattttatgcattaaaatgtaacccatttctgatggaagggttgattagatatttatcagtgaattatagataaaaatattctttttttttttttttttttttttgagacagagttttgctcttgttgcccaggctggagtgcaatggcacaatctcggctcaccgcaacctccgactcctgggttcaagtgattctcctgcctcagcctcccgagtagctgggattacaggcatgagccaccacgcccagctgattttgtatttttagtagagatggggtttctccacgttggtcaggctggtctcgaactcccgacctcaggtgatttgcccacctcagcctcccaaagtgctgggatcacaggtgtgagccgccgtgccaggccaaaaatattcctaaaagacatatgtatggtatctagaacttggatttcaacgaatgtattacattcattagttctttttgtttggttggttggcattttttagagatggagccttgctatgttgcccaggcagatcccacctccaggcctcaaataatcatcaagccttaccctcccaagtagctgggattacaggtgtaagccacagcacccagcacttactatgtgcattagttctaatcttgtaccctgggcatattttaaaatagaatttataatactatttctaagtatttactaccaaacattgattcctccagccttaacaaaaatccaggaaattttgattaatagcaacgtcatggcaaaagtgccaatgacaggcgatatttgagataaagaacacaattactgaatacattttttttgtttccaaagtcagtcacttgtttgtttagacaagctgtggccatctgtaagggaaagtaaatatgctcaagcactggcactgcatacgtgagaattgtcagtctcactaccatcttctatgtccagctgcccagctgccctgcaactacttcagggagaaactagcaggtgcccagcaactacttcctgcttcctccctgaagtaatatgtaaagtaccaaccacaatgcttgttctacagtagacaagaaatgtaccaaccgaagaccactctggagctgagcaaattcacctcagaatggccagatctgttcagcacagagaactggtggacccagtgactcttcttcaccacctgaaaccaagtaactttaccatttataagcacttttatagccaagagtctgactcaactctcatatccatcttgagaagcagatgcttttattattcacatttttataattataaaggttcaaagagttaaaattaaataatttctcaaaatcatacggcaataagtgatccagtagagattttgaaatgagagctctaattccaaagccttttctcataacacactgtcctttcccttcaggggatacgtgcacacactagtttgcctctttttccttttggcttcacatctcacagctcagttaagtacagacaaggctattccccacccttatccccatccctcacccccaccccacacacacacacctcaccctcttcttcatccaactgcttccgtttttccttctctcacaacttggccaactacttcagagaatagctttttttctatctccatttttcctcactccccctgttcaatgaatttaggtgttaaaagccatatcttatcacaagtgataaacttagaagtactgctaatatttcagtatatcagggaaagaaaagccatatactttgcaaccagcctcaaagagtcccgaaagtttctaagaatccctttcagatactctgcaatcatttctgtctcttttaaacttcctgttatatgtgctttcttttaaacaccaaccatcgcaagtctagataaatgataaactctcattctgttttactgcctttgtattatgcttatcacttgtatcataatagaactgttctttacattttgttcatcactgataatacactatttcactccaataagcaacaaagggcttgtatggtctagcgtaggaaactaatcagaatttaagattgttttctgcaagaccaaaaaaacaaagtgttttaaatatctactaattggtttacaatggaaaaattttaatgcaaaccagactctaaatttcatgaggctttcattcgaaaccacagatactgagctcatttactactcggtatactaatatttctagtcatggcgtagggccatacttaagtaaatagttagtttatagaaaggaaataaataggcttatgattaattgattgatcattatcaatcatgcactaaactcagaatcgcaggggtgaagtaagttggagaccatggagtcaaaccccttcattttagaaatgaagaaacaaaggttcactactgccctctgatgaagtgggtaactagctcatactacaaacccagcttagcaccatttcgagtgacctttagctgaggactgacatctgctagtatgcacattagctacaaagagcacagttctaactttgaaggtgattgggccaaagcatcatcaggtattatatcccaattctgcaaccttaggaaaataaatgttcatactaaatagaaaatgaatttctaataactgaattaaactgttcatctaaatagccaacttcagatttctctccacacataataacttggaaaaatatatagcccatgtttactatagtactatagctacagtctctaagaaaagctataacttgctaacaattttcctgatttatgtttgaaaacatacagggcatgaaatgatttctgcaaccttacattttcctcaagaacactggtgagcagaagatatattccaaaaatcacgtgggattgcttgctacatctacttctttcatagaaatgtatgataagcaattatacatgctccaccaaaaaaagtcattaggtttttttccccattaagggaggaaagaagaaaaatggaagaatggattaaaaaaaaaaaaaacgagaaacaggaaagaaagaggaaggaagggagggaactctgacaataggatctattttcaaataatgtttacaatgtaaaaactgattgcctccttaaggaagaaagtgcaataaatattcttctaaagaacagcttgtagataatgtatggttataaactgtaactcactatacaaatgttagttattcttgttgtgagtattttacatatatggaaatttgcttacaacctataagtgtgctaataaaaataggtatttgtgaatataaattacactggtcataaaatcagacttattaatctaatatatcttagaatgagaccaaacttaaatgagccactctataacgtagatatctggaaatatggtttatcctattccattagtatctatcagaataggaatgcaaaagttttgctatacttcacataatgttggcaacctgaatttaaatcttcaaactagtaaacaatcactgtcaggcatgcatattgtccaagttaaaaaaaatttgtttgtatagggaaagtaaaatgagcaaattcatttgttaacatccttttaagtgtccaggttatttattttagcagatacaccataagaaacagccatataaataaataaaatatctttgactccccagtatcttgcatgttaccacaggtactccaaacacactcaaccttttttgtgtgtgtgataactatgatcattaccttgtttaaatgaacaaagtatccttcataataaaaatgtaaataaaggcctgatttaaaactataaatgattattcttcacaactataggtattatcaagcataatattataaatatactaataaacatctgtatatggtatacatgtccaagaggaacgggagatgagatttatccccaatacagtgcagggggcaagctaaggagagagtggcctttcacaatgggttgtgaatcaaggatgagtaaatgaatggtatctaacctccaagaaaaagaaaacttccttctctgtgtgagagacataaagagttgcaataatttcacagaaatttttatcaggaacatactaccaagaatttttgcttcaaggtttgcaataatttttctagttctctgaaccataaggctgtgtgtattgaccttctatttcaaaaagctgtgttactttctgcaatcatctcttaaaagaaggccccgtggggctctggctctcccttttggcaccaccactaattccaatacaaacgtcgtattatagattaggttcaaaattatctaaagattgttctggagaaagattttttttttctttctttttcttttcttttcatttttttttttttttttttttttttttttagacgaagtctcactctgtccccaggctgaagtgcagtggcgccatctcggctgactgctatctctacctcccgggtgcaagccattctcctgcctcagcctcctgagtagctgggattacaggtgcgcaccaccacacccagctaatttttgtatttttggtagagacagggtttcatcatgttggccaggatggtctcaatctcctgacctcgtgatccacccacctcagcctcccaaagtgctgggattacaggcatgagtgagccactgtgcccagccgagaaagatctttaaactctcctacagcaccacacgctcatccactagcatgagagggtgagaacacatagaacttacttataattctttgctctgattcctaaagcctacttactctactgggatggcagtgccaacctaaaaactgaattgcaaagccgtatgatttcacagctttaacaaactgacaacaaagtgacaagagaaaacttcttcctttgcacaagaagtcccggtacattattttgactttatgaagatattttaaatgaatttttaaaaatcacaatattatgaaacttgataatcattacttcaaaacgacagactctattgttcatggaaaaattttcagttggttttatcatacccgtggttcaattgaaagattcaccaactgctccctggagaaaagagaagatctgcatttaaatggatatatagtatttccaaaagcacagtacctagaaggcagataccatcaaggtttcttagtgagaataactcaaattgtattaggtacatttcaatgctgtagctatccccatttcatagggctcaaattatatccataacatgctttttcctctgtgcattcttcataatattgtcttgaaaagtttaaattaaagcttgctccatcacaaagtcctcgcactaacaacaaacaactactactgtacgcatcatttctgatgtgtacagaaaaagaccacagaagatagcttggccagaaatgttaaataattgaaaagtataatgacttaatagagtagtaagcttagtttacaatgcagccaatttaaagccataaaaataccgtgtaaaaattttatcttgtggttgaccattacataacctatctattattcaaaagtatctcaacagtgtttttcttcattaatgtggcttttggcatttccctcaaaatctttctattcccacatttttccaacaattttgaaacaaatacagaatttctatattatatcacaaatcccctttactaggataatgacaccttcggtgtctaattgaaaccaatttcatagatcaatctgtaaggcatactttaacctccttggatatgatttgttttgcatctaacagagtcaaacacacaagacattttttttttaaaagactaaagctacttgtattgacacatctgtaaacaaaaggagaacttcataaataaccccctttccaatgacacactcatccaaggatttgtctgcattagaaaatgtcatagggcatcagaaaagttttctcttgagtattcaggtaaggtgcatagcatgtctgtgcagaagaaaaaagagacacttaggatccatttcaaacataagcccattacctctggcgggctttcgctaaaattctagctgcaactgaaatgtccctgtaaacaaggttactgagaacagccccagatattcctctcagcaacactttcctaggagcccttcagctgtctgccgggttagttataccttatcttgctgcactgccattctcatgctgattcacattcagaactcaaaatgaaagctgaaatatcttgaagatcacttaatattgaaatactgttgcggtaataagtggtgctcagtcagagatgggaacatggtactctcttggtaaccttttaatttctggaaaaattgtacagaataaattgagcagcacacacggaaacctaatcgattgatctgctctattttgttaaagcaacacccatcacaaactcccctggctccccaggcaattcccggtaaagaagaccagcaggtttcagtatataccatgcacgaggactttgatgctattttgatttattaaagaaagggaacaatcttctatctccattcatcaccccagtcaatggacagttttatgtgctatgtgataccattctcgatatacacacgtttaattctacttaatgcgagtttaaagagttatgagaattgctttagtaagaataacaaagccatgcgtaacagacaaatgtacgcttaaatgatcatccaggcctgcttccttatatacttgattctttttctatttgaaggagatgaaacctcatcaatgtcacttcgtctccatcagtgttttcatgtctcttcttcctgtcaggcattcctcagctcgggatttgagaaatgttcaaatttccctctatttcccacaatgacagaactgtttctcaggttggttaactcattttgacaacatcaaatctgctggacaggaaaaaaaaaaaagagagagaaccctgaaaccactcctcaatcccatttttctgtctttttctctaagacatttccgactctttttctctcgcctgctgcttctgaatttgggcattttccaaacacactcccctatttggtctttgggcagtgtgagaaacaaatgagagtttctcttcaaaactagaccaagtcattcagctgctctgaaacatacttcacaacatccgcaggtctcttgatcttgacttaaagtattaggcaggagtgttttgaaagtagtaggaggtcatatggacctaacagcttctcttaacccacatgctgagaatttctttttttcctgtcttttttttttttttttttttttttttttgagagagagagagagagtgctattttcaacattgccctctggtttatgttagtgaaatcatttgctttctgtgtgtgtctgtgtcttattgcatggccactggttctggtactacaacacaaacatagcaaacgtgcttccctaacataagcagacccatgtggcaattcacaacataaccgagacaagcacaataaataaacacatacataatcattccacagcactgaggcaggcgggggtttctacaggcccttccggactcttccagaattgctcattaagattctgaaagggggagagggtgcagcttggaaaaggttgccggaagggaaaagaaagggaggaggggagctttgccctctgtgtctttctgtctctgagactctcccatcaccaaacaaggggtgcaggggtctatcctgcagaggctctaacagacttgaggggtagaaggaggtagatggtttaaaatagttaaatgatgatcgggtgacctccgtgcaacttcagcgactccctcgggaaggtgaaagggttggggagagagaagggagggaaagcagcgtagaggacaggagggagacacctaggactacagcagcagcaatcaccagaaggattttccagcccatgacagcagtcctcaactcctggcaccaccctctcccccaacgacccctgctccatatcccctcaccctaacccctcccctcccagcgccctaactctgccctcactctttgccactttaccaagcactgaagtctctatccaggaagggggatgggaggggtgtttaaagaacaaatctaattgcaattagaattcatctgtgtctccagcacacacgctcacagttttgcagtcatggtaaggcaagtctacaagaggtgggcagtacttatggttgtgttattcagggaggggttgctttttttttttttttccaagagactataagcaagtgaagggggaagggggtagcaatctagatttcaaccaggactgcaaataaagaatgccccagatgcaaatgtctgtctccagatgttgatgataaggatttggaccagttaccttggcagggtcagaactgcagcaggttaatcaggtgagtcgtcggggattttaaagaagccgaagccggtttctttggctatgaaagtctacaaaacccccatgcaggaacattgcacatcttacacacgcctcctttaactgggctcccgcgacctcggcaggcgagggggtgctggccggccctccggtggcaagggcacggccccccgctctgcccccgcgggcgcggggccggcctggcacccggggtccgcgtcccgagcggctgtgcactcaccgagccgggctgcgaggggcagaggggcgcccacggctagccggagcgccaaggcgcctcccttttctcttggtagcgtcggtccgcactccctgtgacccaggacgtcatgatgcctgtctgttttctcaatgataacttggcagaagaagagagaggctgccaggttctcctcgggtggttacgtggtatgtgcacgattctgtttgcatgcgtttctctttttaaaaataaatatctatatttttctaaaaaaaattcccggcactgtcatgatttgattgcattattgcgtttgcataattgacgcctctgggtgtgtatatatgtgtgcatatgcgtgtgatttttttcccctttaaatcctgctgctcctgccgccgccgcagccgctgcaaacggaaagcaagcatgcgttcatcttttgtctttcattttaccttcagggtgacattcagtgccaactgctcccttttgaccgtcaccaatccccgcctgggcaaaataaatttgaaaaacgtggggggaggggaaggaagagccccctcagcccgaatgctggggtttccattcctacggctagggatcccaaacctacccaacccacctcccaaccctgaaaaaccattttcccttctacccaccgggcccaggcagagaatcggcaccaagacagcgaggagcatccacccagggccagacactcatgttcgcggctcgcacttgctgacttgcatctctcagttgcattcccggtgtgtaggcctctcacaactggagctatttttgtctcccagagatgttctttaaagccttttaaaaatggggaggggtcagggaagaaagagcgagagacaaatagagagaaagggacccagagagaagcccaaacccctagttgagaaactcgactgacacatcataaaatttggggggctccgggcatctggcccaccaggggagtctggaagggcaagaaggataactagattttatttaactcattctacaacagcaggaaaacttttttttaatacaaagatgttattgctaattatgcactgtatctgttatttttataattatgctcagaatcagtaggagtggtctcaagaacaatccttaacgtttacttctgcaaatatgagaatgcatttttagccggtgtggccacatggcaggtaaagcacagattacttctttttctaatatttgtgttatttgtacattgtctggtaccttttatgtagcttctcttaatcataatgttgtgtatattacccaacatgtggcatattcctgataaataagtatctagcaccaggtttggcaaatgctttgctctgctttatcaataattatccatttggagtaacaacatttgtttaggaatttttattttcaccgagcctgtagttggcctttgtcaccatcatgtattggtggagtcactgttcctactaattccaaattcctaaaagatgacagcagaggccgaggttgcaaaaaattaagcacaaggagagttttgaatctgaaaagcacagccgattgagagaaaaacttttgaattcatccataataatctgcagctgctcgaaggtttaaaaatagtttacctatttgagaggtcggataagtttaatgaaaacagcaagtaacttactagatcttttccctttagagtcacagtccaagaatcattcgcaaattccacagggaagatattgtaattatgcagagaccagatgatctgaattggagaaactagactaagagggtctgaggactattgactgatggccagatcccaaaacttggcctatgtctctccaccttgaaaattggacatagcttctctggctcactttgcttatctgtccctttggcatgccagaaggatgaattggtgcagtcttgtcgggtgcttagatgttaccagaggcatagatgtttccaaagagggcaaaggcctattgagaactcaaggagggattactataggcgttattggtaactttccagtaactatccaagaggtactcgttaatattcaatctaccatcctggttctccagcttttttacttattaaccttggaattggacctttaaagactcaccacaaagcgaaagaaccataacaatttgactaactttaatcctctgaaatccaattttgttttgttcttttcagacaaatgtcttccatgctgtttgtcaccactccacatgccagttcaggcagctgagtggtttcttaccccaggagtgagatgtttgagcaactagcaaagagtagaggcagcgtacccaagaactctggagtttgaatagatcctttctaagcctagattctctaaatccaactctgcctaggaaccgctctctgttgcttattcaagttcaaactctgcagactactttcaagtctttattttccggcttcatccaaaatataatagttaatattgttggagcatgttcagtttcacttcccaaccaaaccaaagggcataaaaatgcttactaaggtagacggaagatatagaaggcaatgccctaaactttactcatgcttagaccttgtaaatctaattaaacctcctcaacaatatgggaatggaagtattattatccccatttctgtgccaaggaaactgaggcacagagaagttgagtaatttgctcaaaattacacagatggggttcaaattaaagtgtcctgagtgttcgccatcaagctctctgcttacctacctacctacctattcaaacttatttccaactactggcatcactgagccatggttcagtcaggctggtcacccactgttcatctcatacactctgttgactcacactgcgatcccagtgtcgaagctttcaactccctcttcacttcccaattcctttctgaacaaatatgcatttttccgctttctcttcgggtttacctaacatagtgctaagtacaacactggctctcattaaataccttctgatgcattaattgacataaaattgccttatggagacctagaatgccacttttcaatttgacagaaattaaaagttttatgtagcaaaagtgttatcctttcagctgaagaaatgacaagctaatttctccatattttagacagtccctagaaaacaatttagggaagcattctatgataaggtagaacttcatatggggagtgaggtgggtgagcaggtatataattgtagtacttgaaaagctactgtaaacttaattattatgactttatagctcttatgagtctttctctgctatattttgaatttttgatgtcaagatattaaaatttccatttaaaaggaaaggaaaacaaataagaacccgtaggcaggagatatgtgatctcatcttggagctgctgctagtgctcgctgtgtgacctctggcaaattatttaaccattctgggcctcagttccctaattgcacaaggaagggttgaaccagtctccaaggtccctccagctccaagcttacaagtatgacacaggatgtgagagaggagaaaaagcaagaacactcagcctggagtgagacttgtttttttgaaggatgcgaaaaaaatgctggagagctcaggtaaagttagacaagtttatgtctctaattcctgtgtagagttaaaggcagctcaggaaaaaaaaaatccatgcaaaaatatgttcaaacctacggtttccggtggctcacacctgtaatcccagcacttcaggaggccaaggcgggaggatcgcttcaacccaggattttgagaccagcctaggcaatgtaatgagaccccttctctgcaagaaatagaaaaaatcagcagggcatggtggcatgtgcctgttgtcccagctactcagaaggctgaggcaagaggattgcttgagccccgaagtcaaggctacagtaagcggtgatcgcaccactgcactccagctgaggtgacagagtgagacccctgtctcaaaaaaaaaaacacacacacacatataaaaaccctacactttacaaaactgcccttttttaatgagataaaattatttattattatattttttattaataataaaatattattatctgagacaggatctggctctgtattccaggctggagtgcagtggcctgaccatagctcactgtaacctcaaactcctgggctcaagcaatcctcctgcctcagactctggagcagctaggactacaggtacgtgccaccatgcccagctatttttttaaacttttttgtagagatgaggcctcgctatgttgtccaggctggtctcaaactcctggcctcaggcaatcctcctgtcttcacctccagagttgctgggattacaggcatgagccactgcacccagaccccaagatgaaattatcaacaaccatgtttaccagtagcctaccatatcagccaaaatgttattagtcattattcatgtgtgcctaaaactttctttctaacactatcaaatcgtatagacctaatttgatatgaatggatccaacctattttgccttgatgtcttcaactcacgtgtagcttgaattaaatcatgaagaacagaggtctacagagacttggggtatagaatcagaatgagactttttgcatgtttcctgtttaactgagtaagcctgtgttcttttccttatttgtcctcatgtgttgaataattacaactcattgactttctcatcaggtttttgttgggataaaatgaagtagtggaaatgagacagactctaccaatacaacaaaatattatcatgtcagatgtgccttatcttacatctgagttgtatttctaaaaagtttaccaagttagcagagcatgtggagacaagatgtcaggtcccctggctgagaatctgagctgatttctgcacatcttgctagttataggatttcacaaggtcctgtagctagtgaagagcagaattgagttggctatacaaataaactgccctctccacagaccattctcaaaagacatggtacaaactctgggaaagtaggcagccaatcacatctcaccaaagaccaaattcattcaaacatttatttaaaatagaaatgtatatcaagcctctgacatgaaaacagttttatataaggcaaattccttaaccaggtttcattatagctctagggatccatggatgaattaagaaactcttgaagttgtaggcaaagtgtgtgtctgtgagtgtgtgtgtgtatgtgtgtgtattgttctcaagaaaagatccataacttttgtcacattctcagaagggtgcatgactccagaaaggttaagaaccactgatgtaagaatcatttatttaaaaactgaacttataaagaataacacattcatttaagccaaatgtcatgatggccacaacacagatagtgtataataatcaccagtattcagaatgatggccttgagacacaataaaagcctcagtcatcaaagacatttattttcaaggtattttacttaactgacatgggaaaatgaaccagccttttagaaagatttgaatattgatttaaaatgaggtttctgcttttgtttaagccagttgggcaagtctctgtgtgctaagcaaggtggattagtgtagaaaaatatgcattgtttcagaaagcgcagttaggagtccactgcacttgttgaggtggcaaagaatgggggactgaggccggaccttggcagtggggagggaggaggaactggagggatatttggcaggaaactgaaatcaacagacttaaatgtctggcttgggcaactgaattaaaatggtaggatattaaacaggtacaaataaaggttttggtaagaaaataatgaatttggtttaaaatgttagatttaaaggcctctggaacatccagattccacaggtcttgggaaagatttagaagagatttatgaagcatggtggcacatgcctgtagtcccagctacttgggaggaaggttggggcccaggagtttgaagctacagtgcaccttgatcacacctgtaaatagccagtgcatgccagcctgggcaacattgcaagactctgtgtccacattttaaaacacatttttttaaagaagacatttatggctgaagaaatttatttgggaatcatcagtaaattagtgatggcttaagctggtaataaaagtgtgaaaaattataaatgtaaatgacttaggagagtcttaaataaagctgcatttatttgaataagttcttacttttaaaacatgaaattatataacacccaaggaaaaatagtgttggtgactttaaatatttatacaactgtatttgtaccatacatttctgaaaaaacctatccacctcagaattttattttacattgtgggttttctggagttcttgcatttcaagactcaattttccatttgagatagcgcattcactgcctggttttagaagggagaaagagttttccttggcaaccaggttcaactggaaaaaataatcaagatgtcacctgatgccacaagctaccaactacgttctcagctatgtggacctgccagttgctgaaccagcagaggaaactcagcgtcatggaaagaacactaaacttagaacagttgagtgtgagtctcatttctgcctcttactgcttttgcgaccctgggcaagtcattcaacttcccagaacctggatttcctcttagtaactgccctatcatcctccaacaatcctcaggtaacgatccttagagcactggtgtttacgagtcgccaaaggggtggattgactgaacccaatcacatgtttaaaaagccatttccttgattaacttcctccaggatgactcctcccactgtcctccccatgacagcccactgaggttaatctctcctttgtctctacttccatccacaaactgatatcattgtatttatgctttaattattattaatatgactgtctttgctgccttttgtgtaaaagatgttttagttatttttttattcctagtgcctagcacacagtagatgctccataaatactaaatgaataaacaatgatcaaggagaacatttgcctgcatctgttccaattctctgaaaatgcttaagatgaattggaaaatggaaaaaagctgggctagccttactgctaggctgtaggctacatacagatgctttgcttagaaggcacctctccagcctgggcaacatggcaaaaccccatctctacaaaaattttaaaaattagctgggtgtcgtgatgtgcacctgtagtcccagctactcaggaggctgaggtgggaggatcaggattgcgaatagggctgaagttttggattcctatccagaacatgacagttctttacactttcacagacccatgaagcttatcccttctccttcaacccatgaggatgaggctgcagtgagctgtgatctcaccactgcactccaccccctctaaaaattaaaaaaaaggcacctctctattataaaactcctaaatttactgtttactcttatgtgtacagttcttgtagggaataaagtctgtcatttcccaatcagacttaaaactcaaaggctgactttccgggcaagaaaataacactgacttcatttgacactgatatgtaaatgctcaataccaggctttgccagaaagctaagaaaaagaaaatgacagcaggagaagccactgtaaatgtaaaggagggctgcacaaccgaatgtcctgttttcaaattcctgaggaattttcctaagctctcattgattgtgtatttcactttcaaaatggaaattttataatatttaagtatcggggttattgggaaagttaaatgagataatgcatgtgatggcataatcccttgtcaaagtaggcagctgataaaagcaattctcctccctctcttcctttctttcttcctaactgcttaccttcccataagaaaagaatcaagttcatcgatttgcaaccatgatcaatttgtaagtatttcttttggccaggctgcttaaaaaaaaaaaaaaaaagatgatctcagggattagtttatgaccatggttcctaaactttgccacacattggaatcacttggaaagctttttaaaatcctaatgccccagtcacaccccatagcaattagtcaaacatctgagggtgggaaccaggcaatagtattgctttacaatccccaagtgattctagtgtgcttcaaagtttgagagtcactggcaaatgtagggaaatgggcctgtggccagttaatttcatggactggagcctgatgcaaataaggctgaagtgttggattcttgtccagaacatgaaagttctttacactttcacagacccataaagcttatcccttctccttcaaccctccatcagcaagctctttataaatgaaccctagacagagtcatcacagtgaattgactctctgagtaccaaaaagcaagtgaaaaagtacatcataaaacactcatatttatggtattttaccatttagaaagtgctttaacacctgattttatttactctttacaacaagcctgcatagctggcattattattatgcccaatttatagatgataaagccaaaaagaaagcttagcttgctcagggacaaagtggcacattccagtctcatactgagatccgggattccagaatcgatgctcttttcctggagcccctcagaagctccactgatgatgggcaagtaggagtgtatccacatttgaaggttgctacagagaaacggtctagctgctctatcagattaggaaggaaaacaggaagaaaaggagggtggaagggagggagggaaatactgctcattatgttttgagttaaacaggttcctttccagcaggctttttcaaattatttaatgtgcctacaatcattctaagtttccaaaacttattatttccaaagcgattgaacagtgaaaccacttttaactcagcatttctcaggactaacatcccatggaatgtgatttgatatatgttgccatggttttcctcagctccctcaagactttgttaaagtagcaccctcttagggaggactacctatgtcacctgatttaaaacagaaacatcaccttgcccgcagcccagtcctcacctactttcctgctttattcttttcccccatagcccttaacaccttctaatacacttcataatttactcatttattttgtttactgtctcgtcttctatgtctgtaagctctatgagggcagggcattcttcagctatttgtttttacatggtgatatttccagaacagagaaaagtgcctggcacagagtaggtgttcaataaacatggagtcctaatgaatgactggataacaagaaatgtgccaagaaagaaatgcaaatgaaggcatcttcttcacagttaggtgccctttgaaagtatcttttccaatcctacttatccctcatgatgagctaatgaagtggatattattcctaccttatagaaaaataaagtgagaataacaacaattagacctgtgagcagagcaaaaaaaaaaaaaaagtcaagtaaaaagatggttacattagaattaattctttttaattttctatgtaattattgtgggataaagcacatgtgctagatatttccaacagtatctatgaaatctaatataatgtggatagccatgaattgtaccaaggaccaatacatcagcccaggatgctattttctagccaccaacaccagaccaggctgagatataaaaattcagaagatctctggtgcaaaaatggtcatcattgtctggattcagattctccatcagtgaaaccatgattctgagaaacattctctagagttctaacggcagccagactgtaacacaggtgttagttggatcctccccacaattgtacaagggctccactacacaataacaatgctttgcatccaggtggagcttttctctgtaaaggtcaaagtgctgtgagcaattcaaacataagcaggggtgatgatggcccatcaagctcagaaaatgacccagttgaccagttcctctccaaacacggagaataacaatgaagtggagaatccgtagtaataatgttggatgaatgctccgttccgttacattttctttttatccagaaaaaaaaaaaaacgcatttgtgaagtgaattattttggtaatgaaagtggtatttattaaacacactagaaactgcaaatccaaataagtatttcccttcaaaatagtcacttggggaagctatgtaattactttagtgatcctgagattgctctagacattctgggaattcctcttttaaaatcaccttcatagatggtttaggactcatacagaaaaccagtatcatttctctaaggctgtactttatatgacaaaaatacatttcattcccaagccaacttgggtggtcaatatagtcaagatatcttgttaaaagcacagcatgccaggctgaccccaacactctataataggtcagggctggaaatgggagtttgtctttgaatgatggatcaccccaggtgattctgttaggtgccctttgacagtatcttttccaatcctacttatccctcatctagttttcttcacaaactgtgggttagagtgccttgctggaggacagggttggaggctaaaccttatcctgagccagttagttgtattagcccatttctgcattgctgtaaatacctgtcactgggtaatttgtaaagaaaagaggtttaattttggctcacatttctgcagactatacatgaagcatagtgctggcacctgcttctggtgaggcctcaggaagcttacaatcatggcagaaggtgaagggtgagccagcacatcacatggcgagagtgggagcaagagcgagaagtaagaggtgccactctcttttaaacaaccagatcttggatgaactcagagtgagaacttacttattaccccaaggatggcacaaagccactctcaaagaatcggcccccatgatccaaacacctcccaccttggggattacatttcaacaggagatttggaggggacagacatccaaactatatcattagtcttcctctactttatggccacaaagcctgaacctctaacatctaatcattcattcactgacatagcatctttggaacccttaccatttgttttacaaagagtaacctattggtaatgagaaagtcaagcaaaaagtgttgacggttagcctaaaacatgcctctatgagacacatcctctttcttgccaggttcttttggccaacctcatgacttcaactttttctttggagacagaacaaaaaagaataaggagcacatgctccagaataaaactgcctgcagtcaaacccttcctgaccacctaatcaggtaacctaaggcaagttacttaatcggtctgtgcctcagttttccccatctgtgaaatgtagctaatacctcctagggatgctgacaggattcagtgagacaatgtatatgcaatgtttagcacagtgatcatagctttcaactaatatcagttattatttttgacacatgtgttaatgatccttaaatcattaattctaggtcagaaatctcaacctctttccttaccattagtacatagatgcccatcagcatttcaaactgataagatagaaaattgaattaattattggcccaacttcctaaatggttctagctccttggctcctagtcttggttcaaagtatcatcatctgtaggatcatttagtttccaaaccaaatctatctcaaatgctttctcctacctcactccacctcccacatcagcaaacacacacacccacatgcatattcatttagtttataaagtcatgttgattctacctcaacaagttttctttccattcttgtgtgtgtatgtgtttgtggtttaaaacaacattttatttttttttttattttatttgtttatttattgagacagagtttcactcttgttgcccaggctgaagggcaatgatgcgatcttggctcaccgcaacctctgcctcccaggttcaagtgattctcctgcctcagcctcccaagtagctgggagtacaggcatgcgccaccacgcctggctaattttgtatttttagtagagatggggtgtctccatgttagtcagactggtctcgaattcccgacctcaggtgatccccccgcttcggcctcccaaagtgctgggactacaggtgtgagccaccgcaccctgcctaaaccaactttttaaaataaattactacattccagatttaaacactgcacatgcatcaattcatagaaatcttttaacaaccttatgcaataggtgttgttacatccatttttaaatctgtaaaaacggaggcacaaagtggttaggaaacttgctggggttcaatcagcaagtaagtgtgggatctgggagtcaatcccagcagcatggcccagagctatgcctctcaccaccatacagcattgctgctattatttttaaaataataataattaatatgtgttatcaatacaacatattctcatgataatcttatgatgtacatgctgttaaaactcctcttttacagatgagggagttgaaacctgtagtgtatgagttgccacttctctagtttgggtctccattgcgtactgcctgggctaatgaaattaccctcccacgtcttctctgaacctttctctgcacacttttaaaaagttaaaatttttcaaattactttacactcagacttctgaataaccttccccaaagcatggtttttgtccttcatttattctttaacacatatttattaaaaactacattccaagcaatgtttttctaatccatcattcacaggtaaatctggtatgtccctagcctacaacaagctcttactctttgggagacactggcacataaacatcatttctacacattgtaaaatgtgtcctgtagaggtacacagaaaaaggcctctaaggtggcatgtaggggcgggtgggaagaatgggtcaaagaaggctaagcacaagctgagaggcttatacagtcagcgaggcagctgatgggggagagagaaggggaataaagaagagagggcctgcttggcagaggggaaatatgaacaaatgcagagagactcctgtgagcaggagactgcaaatcatactgtcaaataattctgtcattctgtgtcaaaggggtttaggtacccagtctggaaggcttggattggagatttgtcttgaagcttggtttatagaaagcacagagtttttacatgtttattctgttcatttgagcttgcttgcagggagtggaagttgatcgagagtagaggaatggaagcctcctccgtcagtcaaccttggtactaccactggtactgctggaagatgaagtgtgaggcagagagtgaggagaaagagggtttcccagacagctcagggagtctagacttcctgctcaatgagcaacagttaaaagattttaggccgggcaccatggctcacacctgtaatcccagcactttgggaggccaaggtaggaggatcacttgaggtcaggggtttgagaccagcctgagcaacacagcgatacctcatctctacaaaaaaaaaaaaaatcaaaaaaaggtcagccaagcatggtggcatgtgcttgtggtcccagctacttgaggaggctgaggagggaggatcacttcagcccaggcgtttgaggctgcagtgagctaggactgtgccactgtattccagccttggtgacagagcaagactctgcctccaaaaaataattaattaattaattaattaattaaaagaattttttaaagggaatgacatgattgtacttatgttaatgaatagaatattcagatgacgaatgcccctccaagcctcacaattctaaagtgccttcctcatgcacaaagaaggaaccaagcattaaggccctgaggtgtcagcatattttttctgtttgagaaacagcaagcagactcaagtggctgaagtagaatccaaggtgagacagcgtggggcactggaaatagtaggggaaaatatcagagagatgggagtcactggaaggtcctgatggcaggatcaacctcacttggcttattatgaaaagaagcactgtttgctctgatccttgataacacataaagatacgtaactattcctagaacagagcttggcacccaaaacatcctctaatgttgctcttccctcagcacctattccttgttaagcttcacagattcatacttctgttcttccaccttttactaaagaagaaaatgatctaagtcaaagatgggactgtctttgtgtctcttgtagcccctgtgaacagcatgggtgtggacagcaccttgagctactcaaggacagcgctggtacctactgagttcttaattgtggaagatgctggaagctactgtttaaaacatagatgaaatgggaaaggagcaaatagtaagccaccatcaacttgcagtcaacatggtaaagtggaaaaacccatgaagcctggattcagaaagcctggcttctagacatggctctatcactcaccagccgagtggccttgggtaattcaactatctgagcttcatttcttcaactgttcagtgaaggtaattcctgcctcagtattgaggtgggcaatacaaatgaaatcaagtgagtgagagcaatttttaaaggatgatggggtaaatgagagtgagatatcctcatcttatcagttgactggtccccaagcaaggtcttgaagtcacagaactggaatgtaggtaggaaagggtctagagaatcaagcatttggtggcacagggcattgggctttaagtaaaaagagggggaaagaaacagtggctttatcatgtgatcagcagccacagtttttccattcataatagattttgtatccaatattttttaattgacaataaaaaatttgataaactctatggtttcagatgtatcataactctcttccttagggatgcagcttccattgtgagtaacaaatcttggggaaagttcacatgacagttcatctctaggaaagagcatttgaatgatcatggctaatcatgttctgtgtgaattcagttggacagttaagggcaagattccatctattacctatactctgtgaccctctctttcccaaagaggactccaccaaaaccacatgcaaatttagctcaatttgaggcatgacatctatctggacccctagtcagggacaatccaagaaggctaatattatgtcatgatcacccttcctttggccttgtggtgactggtatcctaacttcaataactaaactccttacttctgtatcaaatccccatttagctctaggcataatcctaataatcaattttaaaaagcagttatatgttacactgttagtgtgattcaggcatgtgctaagtccttcattatttttaacatcacaataatcctacaaggtagtcactgtcttctaatagactttgtagaggttggagttcagagagatgaaatacttgctcaggggcatgtgttagtaattggggaaatcaggatttggatcgagctgttcatctccccagccttagtcagaatggtccgagtgctcaaacctggctcctgaatgctgaccctgtgcctgggtcctctctaaagtcttcctgtctttgtggcctcccctggactccctggctggctggaattgccaccacttaccacttgctggatttccccgatgctgatgctgactcctgtaggagcgcctgcctgtctccatggtaacagatcctgcatactattctcctagttagattttcttcccccattctgcacctggacaatcagcctagcacctgccccattctagtagccatccctgtgtctcaagtctcagtgttttccagcctgtgatttccaagcatgcgaagttggctatgtgaccttggagtctcctaggtgaaaacgttggaggccatgacatagatgccaacaaaaatactcactttcaccctatttcactttctaggtaaacagcataaaccttgaaactgtgtaattatcactttaaaaactaaatgagagtgaccaaattcagactgtgatgaattcagttgtttgtatagaagttaaacattaatgcaacatcccaaaattggcagccacaatgatacacttaattgccataaataaagaagttctttcttccaaaaatgaaaaagaataaagtgctgagataaggttgatgtctttaaatgcagtagtctctaagtgatagatttcaaatagtgtttaaggaagggaaacattgtttttgtaagtaatggtagttaaattctcaatacataatccagagaaaagagcggcatctctgactaaatggcaacatgaatgaaggtcagacctcttctaggttgtccttctctgttcagccaccattcgggaagcccctcgtttataccacacacatacatctattcacacactcacatatgcacacacacacacacacacacacacacgacctggtctcagcctttttattttttaagcgattctatgactcattcctgaaagtatttagttcagtgtgaattgagatgacagggttgtaaaagacattgatggttttactttaggaactggatattaaggaagaagaaaagctctgagttgttttgcataaagaaccacatggatcaggagggattttctgaaacagaaattcccttagcagtcttcttccctatcctgttacaagctgcttgaccaacctgaagttctgctgacacggggatccttagctttgaattttgcctccttcccactgtgaccaaccctcaaccctatctccagcctctctgcctgtaaccttgacaacctcctttgcctgactttgaattgtgacagactcactcctgtcactctaaagtgagcatcgccgtaaaaattcttcatggcaaacaatagattctgcctctttttatactttcaccaagctctgcgtgtccatgatgatttaaaagtcagtctccggtctctccctttcagttcgtcacctacctggaacaaaacaacctttaaaccagaacaactaagacagttttcatagatctggatgtatggattagattgatcattgttcatatattcatctgtttttcaagcccagcagagatattacagcagaactaaaactgattaatctgaatatcctctgactgatattaatagtctggcttaatcttaaaatttgaaagaaaaaaagtgaaatttgccaatctgatatgttacatcagaaaaattaaagataagcaaataagagtacgtcaaatctcctgttccttcggacgcttggataagattccctttctaatgttcactagattctgcatgattccaacttttctgctttggattaacagtgtagctcacattaatttttattactgatgactttacccagcattcaggtgacaacaataatttattcatgggtgaatcaaatgtcagtgcttccctgatagagtcctgtgtgatttctagttatgtctttttacttggaagctaaaacttatatattgcactttttcccccctggggttagtttgtgaagtttgttttattaggcaacagacataggaaaaggtatcagttcttcttaatagttgcatttaaatgcatatatgaacatttcattgtgggtagttgggactgaaagttcacaaggaagttacctattagatatatggtctgtttcagtgcccaaacttaatgctgaaatgtatgaaaaactcttctaaaattcagtctgagctacttatgcacaagggccataggattggcctccatacaattatttaagatgttataaagagtattttccatctttcttatgcttggaaatagttaggttttatgactgctgagtcagagccaaaaaatataattttatgccataaaatacaaccttttcctttggctgtgaaaatttatatgtacatatttatgtgcatatatagataaaaatcttcataaacagactagcccatttgagatgaactctatttaaagcatgtcattcctgactctgatgatattactgctatgtttaaaaaaaaaacagtgcctccccataacctaccaaattaaaaacaaatactctaaactggtattaaagtctctacccagttttccaaaaattcttcctgctttttctcctaattcttgacaacacaaactcttaacttgccaaaagagaccaaatacagttgccacttgctgaaacatttgattctgtctcaaactccaccattatttccatttgtcaaaatgttagtcatccttcaaatctcttcttaatgctacctcctttagttattccccatctcctcctaaaattttttctctacaacttggattcccatcattctttgcagctctccgatggtatttgccacaattctgctttgctgcatacttgtgggtatcattttcttgttattcttcccttgcccccattagtccatacaatcttcgaggatgggaatgtgatatagtttggatgcttgtccccacccaaatgtcatgttgaatcataatctccagtgttggaggtgaagcttggtgtgaggtgattggatcatggaggcagaattctcatgaatggtttagcactatccccttggtgctgtcttggtgatagttctcacaagactgggtcgtttaaaagtgtgtggcgccttccctccctccctctccctctctcttgcttctgcttcaccatgtgatgtgcctactccctcttctccttctgccatgattgtaagtttcctgagacctccccagaagccaagcagatagccagcaccaggcttcctgcaaagcctggagaaccatgagccaattaaaccatttttctttataaattacccagtatcaggcatttctttacagcaatgcaagaacggcctaacacaggatatgttctgctcatctttgcagaattcagcatctaacccaacctcacatgaaacagctgcaccagagagaaataaaacaaaactgttacattaaatggatctttaaaaaatcattacaacaacatctttacaacagatcgcatgggcacatgtgttgaaactgtggtatctgatagcccatccacaaaaatgtaatgggacagcctaaaagctaagggctttacccatctgagggattttgaacaacaccaaatgtatgagagcaaagtatcagctggttttcccaccaagatgctcaggtataaaccaatgaagaaaatatttaaatctgtataaaccagtgaagagaatattctaagggaactccatagaatggaatgggaatagaagcttccttccatttaaacactatgcaagcccactttacatggacattgagcaaaaacacaaaagagatggactacaaactcttttctatatactttttcacaacacccacagacccagatccagaaagcatctttagcccaagcaagcagtaaaaggcaaagtcccttttctaatgaccaaatgcattcccatgtgtttgcctgcttatgttctgggctgaactaaatgaagcacccagtagttccgcagataccattaaaggagcccaggagatagcaaacattctccacttttaaaggtagtggaggggactattctcacctaagtactttcttaaaccatacatttccccctaccataaaatgcactcctgccatgggggctagtgggaggttgccttcacctgccccacctgctctcctcaccaagggagctaagtactccagatggaaggaaatctcaaggcatccaatagtcaagaaaaaatctggggaatgacataggtgaatgtggcaaagttacaaaacatgagtggaaaagaaagcaaaaaaccctaagaggctaggggcaaaatggccacagttcatatttagctctggtgttagtgaattctaaaaggttttaatttctggcttccagagcacaccatatccttaaagggtctttaagttggagtaggtgagccctagcctccttaaggggtaaatcatccctgtttatttagcttctaattctaagcccatctgccttgatttgttactaaggagaatgctttcctaaagtccatgtgtcagccttcttttcatcatctggaacacagtcaccaaacacatggcacccaggctgccagccccacccaggtttggaacccatggaaaacattgctcatcaatcacaacatcctttcatgcacacgccaaatatggcctcaaaattgttgtcagtgcagcacactgaaaagcaactactagttaatcagagtgatatgaaaccattataccattcctgtgctatggcaatccctttaaatcacctaaagttgctttttgggcttccaaaattggactacttctcatcactttatcttcctgaaacccagaccttcagcttgctcacaaccatagcaaaccattgcctgtttgcctctttcttgatgtgtaaggccattcttgcattcctataaggaaatacctgagactggatagtttataaagaaaagacgtttacttggctcacagttctgaaagctttcctggaagcatgttggcatcttcttggcttctagggaagccttaagaagcttacaatcatggtggaaggcaaagggggagcaggcacatcatatggtgaaaacaggaacaggcaagagagaatggaggatgaggtgccacacacttgaaacaaccagatctcacgagaactcactcactatcataggatagcaccaacgcatgagggatctgcccccaggatccaaacacatcccacctccagcactgggtattacatttcaacatgagatttgggcagggacaaatattgaaactatattgctcgatatcatcctcccaacctggcttattatattgctgaccatagggaatcactgactctaatttttgctgtgtcttttcggtttccaagccattgcatgtatctgaccttgaattttacctacctcgactcttgactttaatttcgtactggtcagccctgcttctaccaaagttttatcatgaatgcaactcagtgttagtgagtgttccagaagagtcttcatgtttttaattgtttgctccaagggtgcagccatacaagaaaatgtcctagggcaaggccctcagttaagaaatagaatacaggtcagacactggggaccaggagcccaggataccatcagaggttcactgaaattcccccagggccccccttatcacttcttccaacacataactttggagccagtaagtccccagggcaggtatgagcttaggagctcaccacacctctctcacacatgggatgtgactgcactatttcatcaccccaatcctctcagcacccagctcacccaaacaaaaggtcagcattttgatgcgccattgttaaaaggtcactgagtcctgcaggagactataaaatagggtggactatccagctgtaagttaacaaatgggccattctgacaggggttcacatgatttcaaaatttatttacagattagtccatggcattcaaaactatgggaacaatatgagtgaaccaaagaagaaagtcatcttcacaaagttggcaagacttcataaacttcagaaacttttcaaggcagaagttttttttcaagatttctctggattaaaatttcttatgtctcccccaccccactgtgaaaccacagaggctcctgaaacatctcccaaattttcagctgctggctgtcagtaagcattcatgccaccaatatctccctgggagagtggtagttgggagggctctgatagtcactgtgaaaaattaaagatggccacaaactgtgtgctcttcctctcattgagaagactacagactcactcattgaatatgagctatgagaattcagcagaatgacatctgggacttccaaggctcactcttaagaaacattgccacttgcatccagatctcttgaaacgttctctctcaggacattccctcttataatgcagccaatgccacagagagaagccatatggaggtactcaggttgatagccccacctgagctccaagataacggccagccctgtgagtgatccatttgcacatacaacccattcaagtcttcagataagtatagccctgcacctgcctggaactgcagaagagaacccaggcaagaactatccagccaaacacttcccaaatttctgatccacaaaaccacacaagcaaaataaaatgtttgagccacaaagttttggggtgagttttcacatagccatgtataactacagcagaatttgttatcagaaagggattctgtcataaaaatctacaacaatggctttgggaccaagtagcaagcactagatcttaggaccttgaggagatagatatgaaagctgcaaggccttcaaggagataagaacttgaaagagagagggaactatatttgggtcctggagaaagggcacctgaattaaatactggccaacagttagcaatactgttgcctacagtaacgtggaaaatagaagagacagtgtacctaaaggtcttcaggatctgactaagatttccaggcagaatgttgaaagtgctttttgtagttgcctataataaattcaggaagagagggatggattaaagaaaagacttcaaaacaatttaacagaatttaaaggaattacaaaggatctaggatttgctaggtttcaaaataaattgcttctcatctccagtctctctctaaaagggttttcaatgtaagaaatggttaattacttcaggataaagatcaaatccagtctttcttaagacctcaagaaggtttaaagggatgccccacagaaactttcagccacatgaagggctttctaaggatctaagagaaagctttgtagaccctctctgtgaatcaagagaatgtgtaagcatctgaactgtgttaatctataggagcctcatataggactcaagacagataaggatgtatcttaaagatatgtaggtgaggctttttattaatagaataagtgccaataagtcatgggaaacccatagacttttttaagagaatcgtattgatagaagagctgcccacttagactaaaagagacagagaaaatacaaaatgaaaagagggcagactgtttcctggcctttctaccagcaggaaacagtctgagaaagtagctcagttgcagacatgggcttttttctgtttcttaggaaggctgattaaaggtggaactaatatatgagacagtagagacaagagcctcagagagtagttccaagacagttaagactggaccctaatcaaggaactggcaacatgtgactggcttgatttcagaattgctgtggatcagtaactgctgtgtgtctcccatcccacctcccctgtttctgaataggagtgttcataggagttatcttatctctgtaccaccaacatatattgagtaggagtggggcaggtaacttatcttcagattaagagaaatcattttcaaggaactactcctctccccaggagcccatccacatatggacatgatttagatgacaaaatcctgaaccttaaaccaatgctacaatagaaagagacttttgggggcttgggagggaccatttttcacttgggaagaatcgaaatagtttgttctcagaaggaaaaccttacttgattaaaggtgtctacaaacattttgttactcctccctttaagaatctgggccaggcacagtggcttacacctgtaatcccagcactttgggaggctgagacaggaggatcactagaggccaggagttcaagaccagcttgggcaacatagtgagacttcatctctacaaaaaatttaaaaataattagctgggtgtagcggtgcatgcctgtagtcccagctactccagaggctgaggcaggaggattgcctaagctcaggagttagtggcttcagtgagctatgaacacacaccactgcaaacactctagcctgggaaacagagttagaccatgtttctaaaagaaaaaaaaaaggaaattggactgggagagagtaggacacctaatactgtttatagataaaactcatcaaagagatttgggatctttccttatactgtaccacaaaaagtaaaaactattaagatttaaagattactgttagtttgatatatgaaactttaaataagtattaggtagaagaaaataaccaacacaaaaaaaaattctggtgagtgataaataaaccttgttgtgggccttagaggtttcaggaagcctcatgcactttctgagttatgttatcccctcacacctgtggtctctgtacagagggcagtaccagcaacaccttacattccttacactacctctcagccagcaagatcttgcattcttgctgcacagcaatttggacacggctgaaaaaaattagttttcccagatcaaggtgtctaattgcagctgtagtctaacttcaggataaaacagaatgggagcatttaggcttaccgaatcaatttgaggtgcttcttcattccaattgtacatttattggtgttactaatgtctcagagttgactctgaaaataattaactgaacctaaattcagtttatctgcagaacatttttactgtcctgaatggggtacacctgtcatttgtgcatggaggtccaaaagatttctttttttttttttttttttttgagacggagtcttgctctgtcatcaggctggagtgctggctcactgcaatctctgccccctgggttcaagcaattctcctgcctcagcctcccgagtagctgggattacaggcgcccgccaccacacgcagctaatttttgtatttttagtagagatgatttttaggggtttcaccatgtcgaccaggatggtctcgatctcctgacctcgtgatccaccctcctcagcctcccaaagtgctgggattacagctgtgaaccaccacgcccaggcaaggtttttctagttaacagtgtcttctctctggagggatctgctttgtgtagggaagagggcggcactccgtgctgctgagggaaagaggtttccatgtgtcactgtgtgccttcacaatgctactcctccctttaaaaattccttctctcatcttttagggaaaatatgactaggcatttattcttacctgtattaaaattctccacctggggaaaagtaagtttagaatgcagcattttaagtctcctctcccagactgaataacttggggaaaatatatttatctttcttctttggatcttcagagcacaacagaggacatgccatgtggctcctatgcgataaatgtcagctgacatgaaaagagtctcatccatgcatgatccagaacagccccttcctgtctgccccaaccagcctggctttagcatgataggaggtcaaattttgcaagctgcaccctacagggccctatatgatccgtaaacatttcccctacccacccaacaacctctctactgcatatcctatgctcatccccttattcacacttctccagcttcactctcctgcttgctcgaacataccaggcatgctcctccattagtaaccctgtacttgctgtcctctctatctgaaatgctcctccctgaaacttctgtaaggttagcttcctcatttccttcaggtctgcactcaaaagtcactgtctcgtgcatgccttctttgtctgcctgatccagatttcaccctcccatgttgtcttcccttcctgtttcttttcttcatagcaggtttcattatctgaggatatatgaaacagtttcttcttgtcgatctacctactcatattgctcactaagtatctcttcactagaacataagccacaagagccctggggcttttgtctgtttcatgactactcagcccccagaacagttcctgatacgtaatagctgctcaatataaagttgataagtaaaagaataaattcatgagtgagtttacagcaggctaacttccaatccaaagactagcagttttgaggatatttcacaagggtaatttttatcataagtagatgaagaaaggagggaaaacaataaaagatttattagtgtgtgttttttcccaagatcctgatctcatgctcagcctgttaacatgtctggattctacagaggcattatagataaaatagattaagataggcacttttccattttatggatataaatatcttaattatcttgagaggaatgtataaagccatcaccaggaataacagtgattgctgacaggtcctaactctggttgtcatctcactggcaagttcccaaacagagtaaaaaggtttgctgctaattcaaaccaaactattaacaatccctgagtttcctgatgtgttttaagaagagagctcctgtagcatctattagacttatgggcgacgtttgaccaaaaagctgagtgttttgactgtaaagatgcctacttgaaatacaacatgataatagaacaaatattatgtcttacaatcttatagggaaagcagtttcccataatccttcagtatttcaagacccatactgtcagaatattcttacttaagtgtaactttgatatttcctgttataattttgacattactgatgggacagaaaatgaaaagagtcagtcatcctgttactgagactgtagcaaccaagatgcttcctacttacaaagacagtgtgggcaaagtttgggctctgcttttctcccacatttggctgctttccctcctctttgaataccttcctcattgatgactctgctgactctctctctccctacatcagcccattgggatggtggtaggcatggagttggcaagaatctctactattaaaggattgaggataaatttaaacatttagaaccttaagaatgggcatgcagtaactgaagactcctggacaaatcagtcagcctcattaagccttaatttccttatctgtaaaattgggatgtaaaaaatgcttaccttataggactgttaaaagtgtttcataaaccccaaaatgccacattgatgatagttattaatataaataataacagcatatggagaaaatatagcatagaggttaaaaagactaactttgcagtttgtcataattgggttcaaatcctgaattgcatactaaacaactatggaaccttgaaaagccacatcccttctctaagccccagcttagttatatgtaagatgaagataacaatactttatggagttttgtatggattaagtaaaatgattaaataattaaatgaaattttaaaatgaaataaagttggccagccatggtggttcatacctataaacccagtgatttgggaggctgaggcagcctcacttgaggctaggagtttgtgaccagcctggccaacacagtaagaccccatctctacaaaaaccaaaaaaacctagctaagggtagtggtgcatgcctgtagtcccaggtactctggaggctgagatggattgatcacttgagcctaggagttccaagctgtagtgagccatgatcacaccactgcattccagcctggatgacagagcgagaccctgtctccaaaaataaataaataaataaacaataaaaattaatttaaaaattagatgacatcaaataaagttattatggaataataagcactcaacaaatacttgatattattatatatgttattaaacccatttccaagttcaacctggtaattttctttggctttctctttaccaaactgaggtccttaatcttcactaaatgacatcatatcttcagcttctctggaatatttttcgatactgtcattacttttagagcatatttatagaaagcactctaaaataattcagtttaaagaggtcaagcagatgatgtgtatttaatgcttcatcaaaaagttcaaaattctttacatttcaccaaaagttgcactgaccttgctttcaaaaattcatctttgtcaccataaagtccatatctgaatcatcttcctaatctaataataatagctagaaattatttagtacttactatgagccagagcctgttctaagcattttactgataataacacttaaaattctctcaacaaccctatgcaataagtatactactcaccccttcatccatgtggggaaactcagaaaccatgagtaacataatttgcccagggctataccactagtaaatagctaaggaaagaaattaacccaaacagtctgattctgaatcctgggctcttaaccactctactaaacatcttaatgcaaacactagcagatccaagacctacattcagcttggctgtctttgtggcctgcagttactgaataactgtcacatctatactttgcactgtgtaggtctggcctcaaagtctgtagctctatctagtcctgcttgccacagccagtcattaaaatcaatatgattgggccatcagtcacatgatgctcaattctgattctcatcaagatcgacaagaagaaactgtgggttcattcaagtaagccactgttccctctgctcacattagaaagggattatacaatcttaccaaggaagaaaataaatcacacatgcaaaaagaatgcatacaaaggggaaaaatacattttttggcctcagttatctgcacagttaatgtggggttaagataggtatggagcctttaaaatgtagatttcaggctggatgtggtagctctcgcctgtaatctcagcactgtgagaggccaaggccggaggatcacttgaggccaggagcttaagaccagcctgggcaacataatgagaccccatctctagaaaaaaaaataaaaaagtagccaagcatggtggcttattcctgtagccccagctactccagaggctgaggctagaggatcacttgagcccagcattagagactgaagtgagccatgatcatgccactgcactccagcctgggtgacagagtgagaccctatctctagaaactagatggatagatagatagatagatagatagatagatagatagatagatagagacacagatacagatacagatagatatatttcaagaaaacaataaagaatgatgtatccaatttcaggagtagaataaaaagaattcttatgccaatttgggttaatgcaattaaaatagcaccattcattactgtgcacaaagaaggtcttgcacaagtcaattttaaggtgtccacatccctaacacttcacagaccatttattgaattagctttgtttcaccacagatagaggctgtttgtgtcgttatgactaaatctaatagatttaaaatattgttctgccattctgactccaagaaacagtggtagctcttcaacattaatcccttcaggtacatgatgtgaaaataatccaacaatggaccatgtaaatctgaatccctctctacatctgccctaacgactgaatcctaacatcctatacaaatgaaaagaaaaagagctaaaaaataaatagtcctgattacatttcttttgtatccacaatcccttttcctgtgaattcattctaatttcattttgtcctgcagcataagggcatagtttgtttttctagcatgatctctgtatttttcttgtagctcagttggctttgatttacttaggagagaacatcctttgagtaaacattatatgattttaaaaataacagaggcattatttgaaacaaaggttggattggaaagtaaatgtaaacttaaggtttaattacattttgtgtcataatgtaacttcttagccagggatttaaaacactctacaattgagccccaacttgcctttccagtttgttttccttcctattactggtgtggcagaaattgggtgggccttggggccagttagataatttattcacaaacattgctgggcaaatattgtgtacaagttagtgtaataagtacttgggatacaaaaatggaaaagattaacagtaataataagtagatgttgctccattcctttgaggagctcacagtctaataaaaagaaacatatacaaaagtgatcacaaagtatatgaagtaatagaaatatgattaatgtacagtgagatgcctcctcttagatttctccaaggcaccccacatttaaactctctccaaactaattttcttccaggttccatgcctccatgaccacctttgccatacatccaggaatactggaaccattcttgacacctccctctccctcatcctagaaatattttattttatttcatttcatacctaatcctagaaatattttatttcatacctaatcctagaaatactttatttaatctccactatcacaacattaattcaatatatcagaatctcttccctgaactaacaagtctagtatcatccaatcagctaatactcaaattcattcttcacacagtagccaaaatgaactcttccaaaaaaaaaaaaaaatctgatcatgtcttctctatctcatttaaaatggcatctcattccccttagaacaaagagaaatctccttaacatgacttatgacgttcttcagcgtctagcccctacctctcctgccttatcctgtacctcactctgccatccacagccccattgaactaggtttttattcaaccctttcatacatcccaaattccctcttaatatatgatttttgaaccactgttccctctgcctacaattcatctttctcatgtggttaattcatcttttacattttcgctcatacgtaccaacttggtgaagtctcccttagtaggcctcctataatggactcaaaattgtaccatttttttcatcttcatagtatttatcacagttgcaatttcacatttgtctgtgggaatctttgactgatgtctgtctctgccattagactataagctccacatgggcaaggaccatatctacttctgttcattgtgtccaaggcatggcacagtgcctacagacacacaaacaatccattacatttgtggaataaatgaaacagagcaaggaaagagtgatggactttgcctgggggaagggagggataatgttacagcagaggtgtcagctgtgtcgggtcttgaagaatacacacacacacacacacacacacacacacactcatttatcaggcagaaggaacacatgagcagatacaaaaagaaatgcaacattctgaaatcgctcagtataaccaaagctgtaggtgtgatccattttggggaggggaatagtaaagtgtcagaaatgaggctggagagattccgggactaaaccacagaggaacttttgtgctctgcaaagcaatttggacttttgccatgggaaatcactgaagggttgtaaaaagggagtaaaatgatgatcagatttgcattttagaaaaatcactctcctggtagtgtgaaggatgtccttgataggttgatactggagacagggtgaccagttaggtggccatcctacaagtctacgtgagagatgatgaggcatgaactgagataaaaacagaggattaagtgaagcgggcagtttcaatagacatttaggagatgaaaatgactggagatagaaaggaaggaaaaagaaaaagtcaaagcacaccaccctgttctctggacatctgggagggtggtgtggccattaaccaagtcaggaatgcaagttgagaagttaacctgggaagatggctgagtatggttttaaatccactgggatttaacatcggagagccagattcttgtgccagaaagaaaactatcttctgaaatgatttttcctcctatttcatctaataatgtttcagccaagaacataaccacctactagtgaccacattataaagcctcccttgcagctagatgtggccatatgactaagttcttgatggtgtaataggagcagaagaaggcaacctctgtgccatttgcttaaaaggaaattgcttgtcctgaatttctgttcagataaccacgagttaggttaactatgcaaatgacacaacaccttagaggaaggcagggaagcaatatggagataaagcagatgggccagatcaatcattcctctttttggaccacttattctgtgagaaagaaactgcttatttaatccattatatattggagttccatttttaagggatcttcttttatatgctaaataatatagactttcaagtagagatatccaagagacaactgccaacactggtctggttctccagaggcctaggctgacaagggagcactaatataaattagcatgtagacagtagtagtttaaaccatgggaatagaccagaaaaagaaaagcaatctgaagacatacctggatttgcatcctggccccacctcctattagttatgtgattttgactaagttacctctaaaagcctatattctataggcctgtaatgatacctgtattaaggtatctaactgctacaaaatatcaatcatcacatctcagtagcttaatacattgaagatttcttactcagatgaagcccaggtgtatatacaggaggacccaggcttcttcatccggtggttcttcctcccctaggatcttaaattccttcatttacaacgactttccttccctagtccatggcgggaaagacacacacactttttttttttttttttttttttgagacagagtttcacttttgttgcccaggctggagtacaatggctcgatctcagctcactgcaacctccgcctcctgagttcaagtgattctcccacctcagcctcccgagtagctgggattacaagcatgggctgccatgaccagctaattttcttttttctttttttttatttttagtacagacggggtttctccatgttggtcaggctggtctcgaactcccgacctcagacctcaggttatccgcctgcctcggcctcccaaagtgctgagattataggcgtgagccaccgcgcccagccagcacacacacttcttaaccactttagcccagaagtgacatatatatttcgttgttgagagcaactatttgatcccaacttgatgcaaaacagcctaggaaatgttatccgcctagcagtcacttcccagcagaaatgctaaccaatggaaatggtgcatgaatctttagtgaagcagtggcttcaataatattctgctctgtttctcgtggaaatgaaaaggaatagatgatatacctaacagtatatcatgcctaaggggtcctacataatgttagcactcatcttctgccttgtcattctcctccctcctccatcctttacacacttgtattatgtcccaaataggccttcaattttcccatttcagtgtattaattacattcttgcctttgtatacaaaattttaagcacaattcttcctttttctgctccaccagttccacctctttacatgcacatgtatgttcattgcagcactattcacaataacaaagacatggaaccaacccaaatgctgatcaatgatagactggttaaagaaaatatggtacatatacaccatggaatgctatacaaccataaaaaagaatgagatcatgtccttcgcaggggcatggatgaagctggaagccattatcctcagcaaactaatgcaggaaaagaaaaacaaacaccacatgttctcacttataagtgggagctgaacaatgataacacatggacacagggaggggaaaaacacacactggagcctgttaggggagagtaggggggcagcaagagcattagggaaaagagctaatgcatgctgggcttaatatctggatgatgggttgataggtgcaactaaccactatggcacacgctcacctacgtaacaaacctgcacatctcgcacatgtaccccagagcttaaaaaagtaaagtaataatttttaaaaatacccattttaaaagactagtctcaaagcaatctcctggaataagctttctctaattcttcatgagcagatgaaacacctttgagccactatcacaccacatataacctttacatttagcactttccagatgttggtttgatataacaatatgtgcactcaccttccctgactacctctgagcctaagatgtaagctccctgaaggcagcaattgcatttaactcctctttgttcaaagtgattaaaagagtaaactgaatctagactttgaacggaagacaccaacacttagagatttgaggtctcctagcaatgaatgaagaaataaacatttattccacaactctggaaaggaggaaaaaagcagtttgtctcaagtatttactcaggtgatgactacctaaattactgggatagtactatatttcttgattttaccttgtaaatccatgaggaagcatgtgtggcaagacctgctcatgaataaagcatgtacttaacgaacaataaagcaacatatctttaaatattatgatccctaagaaaaacaaacagttctgaagaggcttccttaagaactctccacgtgcatgaatcaaggtggtgatgtggcagttttctgggtaatttgataaatgtcaacaaccaaactatttaaatccatccatcagatgaatacaccactcttgagttatctgaacacttgccaggtcactttgttctacttagatatagccactgcctgaggaaaagaaaaagaaagaaaaaaaccaaggtaatcgggcttaggtagctcactgaaaatgcctgtattttcctttatccaccaatggtcctcataaaagtaggcaatacatagaaaggaggtatgtttcagcaaagaaactcattctatgcccctagccaaaggttgagtatccctcaaataatacacagcttctgtgtaaagagatggtatatgatcccttctcatgctgcccttctcacaccaaatggtctaaaatggcctcagaattcctgaaggatgctaaaacaacccttctgtcttaaccatcacccagctgaagagaccagagacatatccagggatccactccatttctaaattctcactccagggcctctgaagacagctcagggctgatctgtatcaagtctgcccattccctatcctagatcccagtgcttgctaggttatcagaacaatactacactggggagggagggcagtgggactccatttttataatatactctatatccataccagtaccacaagtgtactgggccttccaggggtcacaggatttcactggagtatcctgtacagcactagacctagcagttgttgtctgtacgaaggatgctgtgataaatctggaaaacattacataccatagtcctctctcagatatttgcagtacataatagtacatactagactctgaaacatcctatagtgaagaaatctgttgaatccattgtttcacaaatgtatttgtctacaagaaaaatcttcagacaaaacacttgttgacatcttccctccatagattgtgagttggttccatgaggtcaggaaccatgccattttggtcatttcttttcctcaagtgcttaacatagtatttgatactttaataaatatttgacaaattaatgaatattgtatggaagtagggtcccaaagaaccagctttgtaaaactatatgataaaaacatggcatatctatggaacacctcaagtaagaacaacctcactgaactggaagatcactttgaatctatttaaatcccaacatgtaaggcaacattaaaaatatgttggtatttattattatcatatgtggtcagacaacttcttctttcctctcaaactatcttttcttagtatcaaataaatctaactaaatatttcaagatgtttggtgtctagatccctgatgcttgaatttgctgtgtatgagaacctcttgtgggtattattgaaatttctgaggcccagggattcagtatttctagagcagggcccagggctctacattttacacaaataacccaggtcactctgtcatagggttttggatggaatgcactctcagaaaagctgatcaagagatattgtggtagaggaggcctgaacttgttatcagaggcctagctttgagtctcagctctgcatccagactagttgtgcggtcatgggcagtaatctctaagcctcactttcctctctgtgggattcaaaatatgtttctttacctacctacctagctacctacctagctacctacccacccaccccgtagcaccatgtaggaaaaaagtatctataaaaccctgccttgaagcctaacagatacttaacacatgttgttcaataaatcaataaatttgcagttatttcaacattctataatattaaacaaattatatcacgccaagtggtacagtgcagaaaggttttctgctggttatttagacatagataaaatgcctgaaccaactgtgctgtatacacccatgccataagcctggcaaatcccatagtacacttggcccatgtttatggaaatattgttggccaaatcatggtgagggtcaagctatatgacattggtcacaacacatagaatattaaaatatttcttctgcttggtaccagatcttcaaaaagcagactctttaatcttaagtaggcaaacagcaggaattaacttggcttggtatagacacacctacaaagggaaggttcctgctaatcgagtatcctcatcaataataattaacaattgttaaaaaattagagtgcattggaatacatgtaatgataatatggtactctgcatatccaattatctctccattcaagagacctttctggagcccacagtactcaggctaattgctatgaacactgcccaactgcattgcatgaatactttgaaagcattagacattggattgattgtttcccaaatttgtggcatattctgaagcctgccttttgaaatagatgtgatattacttattatttaccttttgtgcataaaataaggaaataaattctataactgaaaaatctctgcctaaaagattaattattagagatttccaattacggggtgtcaactatactcacggtatattgatttatatccatttgctttttgtgttggtgtttcttactcttctgattttaaacacttaattgtaactgcttgttcgaagtctcattgctctgtgattaatgctaacagcaagagaactttgcaaagctaaacttgtgccacaatgttcattttctatgtttattattgccttttgcttatatgttttggttataagctatttttcatgcctgtgtcttatgttagcagtaacaaacgtgattaatgacaggacttatgcaggtaaacaggtgaataaatcatgccaagtttggtgaccccatcaaaagatggccttgaaaactcacctccagctgatggttgccataagagaatgcaggagagcagccacagcattgctagaccttccagtgtttcaagagaagtctaatgcataataggtactcgataagtatttgttgattcaatacagagattcagattttcatctgaaatccctggattattttattctaagcaacataatgtggtaagtaactgagaacatggactcttgaatcagactgcctgacttaaaaacccagctctgccactcatcagctgtatgacctcgggcaagttatagaaaaactccctgcctcagttttctaacttgtaaaatgggggaaaataatagtacctactttgtggaactgtttcagttaattttaaaatatttttaaaatcttgggagaatatctggtagaatgtaagagctacgttaaaaaggaaacacactaaagcttccatttttttaaataaatatgtctcatatgtagaaaacattttcacatatgttattcctttttgtccccacaataattatcagataaaggtgttattctgcagataaggaaagagaatttcccttgggatccctcagatgttttcaggtgacagccacacatgtgctcgctggccacgcaagagcactgtgcacaggtacttaggcagtatccaggggtttgcccattagcacactccataaaatgacaaatgcagaaatttgatccaagaccactagtggacaaaatcggaggtctccaaaccagtgtccaccataagtcttcttactcaataactaactaattaaaataaaatgaagatctcatccaaaccactgcattcgttgttttcaatcaataaattaattacctaaaagcaaccaatttaaaacaataagcaaagcctttacatttaataatgtccattgatatccttactcttttattaagttttgtcttaaaaatgttttgcaatgatttagtttctctgctctctgactccaagaactttctctcagtaactttacaagcatgtcatctgactactgtggcctatgtgttagaaactgctaaattagaaacaccctgtcaaccttttgattttcctggttattgttggtttaaggcagctccttaatgttatttaaacagaggagactatttgaaatttcttggtagatgaatttgataatgataatttaaaaaaaaataactactgtcatcctgagataaaagatctcattcataggctagacaccttatctgaataactcaggacttcttcgaagaaaaaggtcagtgtagccccacctgtttccttttcttgaacagcaataactttacatactccctgataatctgcatttggtaaagttgattgggcattaaagaagtgtcttctctttacttgggttttaaatttttgttttgtgttatgtttaatctgagtcttttcatggatgtgtaatgtctttattgttaaaaataactactgctatctcctcaggcggaggtaggaggatcacttaagcccagaagttggagaccagcctgggcaacataatgagaccccagtctcaaaaacatactactgggaattcatcaaaattaaaaacttctatgaataacagagcactatcaacaaagtgttaaaaaaacccacagaataagagaaaatacaaatatttgcaaatcctatatcttaggatttaatattcggaatatataaagaactcttacaactcaacaacaaagagacaaaagtcccaatttaaaaatcgtcaagactctgaatagacatttctccaaagagaatatacaaatggtcaataagcacatgaaaatatacttggcatcattagttactaggaaaatacaaatcgaaacaacagtgaattaccacttacacccactagtatggctatcagaaataaaaggaaaataaatgttgatgaggaatggagaaattaaatcccacatacatttttaatgggaatgtaaaattatgtagctgctgtggaaagaagtatggttggttcctaaacaaagttggacccaagagagcagaaaacatatgtttaaacaaaactttgtacacaggtgttcacagcagcattattcataataaccaaaaagtggaagcaacccaaatgcctatcagctgatgaatgtgtaaacaaaaggtgatatatccataatattgaatactattcagcgataaagagggatgaagaactgactcatgttacaatatggatgaaccttcataacaaatgaagttatatgaagataataagagaaagaagccagatacaaaaggccaaatgttaaatgattccaactataaaatgtccagaataggcaaacccatagagacagaaagcagattaaggcttgacagtggctgaaggggagggaagaatgaggagtgactgtttacaggatgaggcttccctttggagtgataaaaatgttctggattcagatggcgacgaaggttgcacatcatggtgaatgttaaaaaaaaaagccactgaattatattgcttaaaatagttataatgataaatgtgatgttacgtgaagtttacctcattaaaaagtaaatattaacttgaacccccagcagaagaagcaaaaagcttcttcttcctatacaaaataatttcacacaatatatcacccaaatgattttaaggagtggaatactacatctagaagatagcagctgacaagttgtccttattccctttatttcattgtgccacttatcatttgccctttgatcttgaatatcatttttggtttgtcacattgatagcagaaactgcaactttacttatttacctatttatagagagagggggtctcactatgttgtgcaggctggagtgcagcagtgggatcctagctcactgcagccttgaactctggagctcaagctatcttcctgcctcagcctcctgagtagctcggactacaggcatgcaccaccatgcctggctaatttttctttttctttttttagacaagggatcttgctatgttgctcaggctggtcttgaactcctagcttcaagcaattctctctcctgggcctcccaaagagctgggactgcaggtgtgagccactgcactggtcccgaaatgtcacccttcctgatgttacatctccacttccaaatgttcactgtcaatagtttagctaatttggtaatcatcaattaatgaatatgtgtaggagttttctctcttctaaattacattaaaatgtttgattaaaaataattgaatattaattattttggtaaaagggggatataatttttcagaaatcagtaacttgaatcttcttttaacttatatgggatcaatgaatcagaagcaatgatgtatctgacagaaaaaataaagaacataggagacaaactaagtattcatcaagccttcctgaaaaagaacacatacattttctcccacgaagaaatgccttttattgtcttttttttaactattaagacgttagcaataaaatatagcttaaataaatggatcagtagaatatactatattgccacgaatttaatttttctgaattgtaaactcccgtcaaacaggttgtacaggtggatatgttgaaaacaatctcatttaaacacatacttgttaaagcaattaaaggcagattcagttggattagagaacataattctgaagaagtatgctaaagttaaatgaaaagttctgaaaataagttcagttgtccattaattgcaaaggtccaatttcctgaagctatgttaaatacccaagctatgatttttaaacacctcaaagaaaatttctacataaaaaggcatgtttatcttttatgacatgtctatttaaaggttaatatgaccatatttattaatgaccaggtttattccaaatagcaaagaaaaaaaaaaacagtgagcaagtatttgaataattcaagttaaaaaaatatcttcactttgatctcaagcatgtatctaactcaggtgaaagcaaaggcagttttagctagaactacctggagaattgaagagggagtaatcctgtcccacagaatccaaacatatctggttcatgtgctgttattgtaaggaaatttgagaaatacagcaactgaaaccaacctgttgaaggtgaccaagaactggatgaaagtaaatgcttttattttatgtcaaaatgaagtgagatattggagggcgcagaagactttggaggttgtatacgtattcagtggtcaacttctaaaaatgctcagccagaatacagccctgaacatatggctaatacataatcggagaattctatttcttcacttaaggggaaaaatttgagttcaaattggtgagacctaatagaaaagtatcaagttaattgaaattccttgtcaaagagtcacttagttctctgggttctccctaattccttccctcctgacatctgggtttcaggcctcagctctttgccttgaaatgtgtaaatttgatgatcaaataaaatcctggaaggagactatactcagttcctctagacactgacctcttagaaaaagaaatcccaataagggagggcacaagattaggaagaccccattgctggagctctggagttgctgacccaagaaagatgatgttggggatcagagtggaaaaggagggaggaaaggaattgttccaacttttaggaaaagcttagccattgccttcatctgtccatgctcagtaattttatttttttaattttgtagagagggaggtctcactgtgttgctcaggctggtctcaaactcccagagtccagtgatcctcctgccttggcctcccaaagtgctgggattacaggtgtgtgacaccttgagctaggccaattaattccgtattctagtcaaaggtctagctgggaaaagggagaggaacaactgggattggttctcaggccattttagtacccagatgacacagccatgctggtagagaaggaaggacggtggctgaggaattgcaagtgggattgagaaaggtggggaatttcaaggctcataaagttatcttggtctgggatggttcaagctgattatcgcatccctggcaacttagcagccagtggcaccacgaaaaacacaatttaggaactgtcaagagattatgctctgattattggtaaaatggtggctgccacttataaccatgatctaaggtcggtcgtctaagaaaagcagggcctgtatgcagatgggcacaggtacccacttctgtccaattccacgtgcatggacactctcttgttgcttcttcttgggggttacaggtgcatggttaccccgtccttgcctcgttttgggggttacaggtcacagatctgaagtatttctaagaggacaattcctctttctgccattttccagagttgcttgaaaacgagctaatttggaggaaatgaaatttcttctttcttcactaactgatttggaaacaaatgggcctctccgttctctgtcaccacctcccttccataccccgaaagtttcttgtctagttttgtctacatggtggaaatgtcatctttactcgcaaggagaaagagaacttggggtccttcctatctagagccccagactgtgaggaaagacccagggctctagaggtcaggccacagaggcctagcgcgggaaggacaggccagaaagaagcctgctgttgggagagcgaactagaaagctatggccagcattgccgcatagagagctgagcgagtgagtctcacagccagagcaagtcactttcctaagcgacggaagctcccgaattttaagatcccgtcaaaggcgggaaaagccctaatgcttcacaaaattcttgaaagcggaatgaatgatttagactacaaacactatgctcccaccgctacccaggagcctggcgcctagcgccccatcttcaggacccagagtttatgctaaagtaaaattgccggaggtactgggagcccacgctcgggccttctccaactttggccaatacttgagcgacgcgtgtcatagaaacattttggggatggggtatctaaatgtgtctgagggtccttggctaactaactccttcactcttgaaagtcctgggcttttcaaactgaacaaggtggaaagaaagacagctagcaatggtgttttccttttttctttctttctttctttctttctttctctctctctctctctttctttctttctttctttctttctttctttctttctaactgtgcttttactttgagtcttttccttctctcttttcctcagtacttctgcctttcttactttgacctgttctctcctttccttcccttcccattagggcctagggcaaagatcaacagctaagataaaccctcaaccaaagagctgagcgcatttacagttggggaatggggctgagagatactgagacatcgcacctccagcacctgaattccaacatttagaggtcagagccaccggtttctgcctatgaagatgtactaagtttcgcatctacccatatccccgaatgtggcccagagttagtggcagaaacttgtttctgcttttaactttgcagttgagttttggaaagcggttttgggagggccaggttgagaatctgggcagctccgggccagatgcgggcgccccgggtcctgtctgaaccagactgctgctgcaatgtgagctcgggagggaactggggatgcgagctgggaacagaccgcgctccagcccccatggtttgtgacggggaacttcgggcgcacacaccctggggagtaggtctcctccaaatggcaccgacacagactggcgctggatcttctctccctgctaatctatccgcaaagaccgcctgggcacttttgggggaatgtggccaaaaggggactctaactgcgacatctacagaggaaggagaaactggtggtgcctaagaagttgatctcgatgcgcgcagtgagggcacagggccctgcgcgccagagaagcgaagccagcggtctccacttacttgttcttaattcctccctacccccgctctggcctctcattttcggcctcatggatccaagacccgaggttattttcagtcacaactttctccacaccccgtacccccaaaagtgtacctcagctcaggcgggaaagggcactttgacccgccgtgcgcgagtttccagccagccgctgcgcgcctgagagaaagagcgcctggctgcggctccgagcgcacagctcttccccgcgtgtttggcgcggctacgtttctcttgctccgggctgaggctcgaggaacctcgccagcctgctgtggtcccgtccccttgacgtttgatttctaaaaccgcatagtctgcggctctggcatttagaaaaagaggacaaggtcaaggcctgtggaccgaccgccgcgatccgcttgcacctttgctctcacagcaagcgagtcctggccgcagccgctggaaaaaggtgccgcagcgcccagtttacctggaattcagggacctgaccctgactctatttccggctagtcccagcctctccttcctctcctttccccgctttccgcccagggcggttctgagattttgattaagagagatctgtccccgcaccgcagagggatggtgccaaatggccaggcttcctgggcactgcgtcctcattcccaggtcagagctactgcgaaaggaaaggtctccatctggacgcacctcgtcccctcccccagcgcgcggggcagccctctagggccagctcgggcacgcgcttttccccctcctcaccccctgctccgcccagccccgtacagttttattctttatgaaacacacacgcccaccccgcctcccacgtaaaggccagtcttgactcattttgcgcccagatgcaaactcagctggaagttgagggtagggccaaagaggtgaggggagggtaagagatacagcgaaatagagaatgagaagggagaaatcaaagggggaggagggacaagagaaagcgtgtggagctggaggttgaaggggcagaggcggaggccaaggactgagcaaggggcgcgcgcgcggcggcggcggcggcggtgttggcggcggcggcggcagggcggctgcacctcctcccagccttttcgcccgcgcgcgcgaagcggggtcaggcgcggacccacattcaccgactgcagaactgttttctttgccactaccagagggtgtttcggggctccccacggtcttctccctggctgcttgccgcgtgagagcagaaataaaacaaaacaaatcacgggacacgacggagtcgggccgctgggcgcctccgggatcgctctcactttgcactcggaagcgggcgcggggattcgggctgccgcgtgtagcctataaatagcaaactttttgaccgaagcaactaacaaataagaggagcaggcgtgcattttgctcaagatccccccttttctggggacgaccttactcccacccccgccccctttgcagtagttgtgaggggatagattgggagagagagatgaaatttaattttattagaatttacagtagtggtgttaatttttgcggaagggggtaagaatctcgccatttatctgaccttctctacccacctacctttgctacccttctcccccacccaacaactggcactggatgggaagggcaaagagcggagctcccagggagggtggctgttgaagacagggggcggagggcgatccggagccgggtttctctctgggagtaccggagtgagtgggagggaaagggaaagcaacgccaggagttggcgttttcctgaggtactgggacaggaatttaggtaacccagaattttagatggaagtgcgaaaggtgagtgcggaaggcacaaaggagttcctgcagtgcagatttcctttcccagaagcgacaataacccactcagcaactttacttcaaccctaggctctggcctaccgggagggcaaacgcgggcacccgggtcacgtcatcgcttgcttgggggcgccagctctagcgtaagcctgagctgcgagatagctccgtggggttttgccatggggtcttgcttactaatcaccccgcacgccctcacccctgtccctggacgcccttttgctgcacccgctcacatctgcagacccaacggatgggatctacttgactgagattcctgaacacaacttactgcccgcccttcccctttccttttggccaggccggattgtgggtggtgattggctcagtaggattttcattttcattctaggtgcttccttaaaaataaagccccccgaatataacagacactcgctccatacaccaaacttcccagttcctgaggttgctacgctaaatttatcctgaatgtcgcacagaaaccagggtcaataggacgatcagcacggatgggtgtggggattgaggaaattggagatattgcagctgacgccaggtaccgggagaggagagtccgcagatgcagggacgttgctctgctcctctttggacgttctctgcctcagtgtcaggcctgcgaaatgggagtcaagcccgtcccgtgggcctaaagcgactagtagctgggggggagggagccggaggacagtggtgctttttctttccagtgccccacctctgcccaatgccagcagccagtacactacacaagaggtcaaacgcctaacctctactagtaccccaaagggcaaaaaccaaacagggtcccccatgcagtttatgtagtggcgttgctgacccaatcgcgcctttcctaacaccgctgcccaccagttacctcctcctaagaccgcttcccactagttacctcctcttaaacgcaaaagttactctgtcccagaatccagtttggaaagagtggaaaaatgcagaaatactaagggggctcaggcagtagctccccctgcggggtgtgcccaccgcccatggctccacgcaggcgtttgcgcgcgtctccctttccagcccccgcgaagaccgcgcctggggctcgagagctgacggactgccctttccaggctgccccaagggcctgggaggctgcggtaccgcctgtcggtcccggtcccgagcgcgcttgcttaagagttctcaaagacggggttggaagcagtacagacgtccccggttatcgctgccgggcttgtgcgccccacgccacctacctgtccggccttcccgctccaattgctgacccgtttagggagcccggcctggagcccgccgcctccagaggagcccgccctcgccctcccccgcgcgcctccgctctctgggacgcctggccaaatgcggggcggtctctcgcgggccattggcttgggccaccgttccgagtcagctcctaggatttccccaggctttgcggcccctttgtgggtctaggccagcgcctcaccttgcaccctattccacctccagtccccttaggtgcccccgcatccctcctccagagtccaggctttgaaactgcagcaactccgcaaagaaagcctttgggaaaacctcctagagggccgaatgtggaggtcgggtgggtgggtgggtgggtactcgcggcatttctcaaggttctgggtgttcgtaactaggggaacaggccctatgggggcagaaatgacagacgcacgaacagcgtctctgtggctgtctgcagcgcgaggttcacgtctattgttttatgcctccgggagagctaccccgcgtgatagatcttttcagatccatcactggaagaaaaaccctggtgataacgattatctcccgctcgcgctatctcgccatcgccccaattcatctccctctggctctagccccttggggagacgaggagggcgaggcgctggcaggaggaccggccaagccgctgtcctcggatggagaggagagggagaggcacgaggccacctcattcgtccctttccgcttcgggctggggagacaggacaccgagggtttctttctgtctctgccaagcctcacgcttctttcaaatgattttagcctggtgctacggtctatccatatacatttccaatctcatggctcataaactattagcaaaatggtttcattattcaccttctgtatcctacaaaagggagaaaagaaaggagcgggaggaaggcacagtgggggcgggggacagtcgtcggacactagttaacaatgatgcctccggtgtttaaatcatagctcagactgctttcttcaagccgacactcaacaaatctggtctgtttccaaggatctgtagccgaccccttctccccctccccctctcctctctgtctctctctccatccatcatatccatctctccttaatacttggtattctggaaggaccagatgaatagcgagatactgcaaatccattatttgcttcattaggtgtcatcaataaggcacgccctttagatacgacacacataattaattggttagatttgctatccctggcctccttttgggtggtgttggtgatgggatcatgtggcatccctgaaaccatgttaagacaaaagtctaggttgataaccaagaagttgacttagagatcggtgtggccttaaggtgcccaactcggcaccaagtcctcatctggcttctgcaagtggggaagttgcaatgaacgatgtgtgggagtgtgggtgaatgtgggcgtgcataggagcgcctgcccctgtgaatgtgtataggcaggagaatgaggcgggttgggccggggggtgctaacagatttcagagagagg

SEQ ID NO: 189 - DNA, 131797 bp, Homo sapiens
  source 1..131797: mol_type = genomic DNA
gatccatttgtttttcttttctttttgtcttgggtgctgcagcttgctccaaagttatagcagtcgagtcagagtagacttggttaattttcttatcccatcaccttctgaaagctgttcaaatctacagagtgtgaccatcacctcctctttcccttgtgtctccttctatcctcaccttacccgatcctcccaaattctgcaactgcttttgaagatactgtctcctctacagacccccatcactgcagcttcaactgtggtctcagcagtattgttaagaggaatcaccaaagcccggttgcctgagggctcctcatctgaactctggctcctagtgggagaagcgtaagcctaagctgaattattcaagtacgtcttgtatctttgaccctggtgagcactgagtcgggtacttggagggataactgcaacttggcactgaagaaaagctctctggttgaatccttgactgaagcagaaacctattctctgtgtgctgtttattcgggagaagagttcaaatgtggcctcaggttggctcaggagttgtggcttttcccaggtttgcagctgaaaactaaaaacaaaatataaggacctgaagccatttttcccaaagtctcccagtgagtggtggtggcttgaccaggattgaggggctgaagccttcttcgcggccagtcctgctccctgaccaccagaccacacagtccgtgcttaacatgtactcagcaaacctcaagctccaggcctgaagaaacagattttccaaaaacagagctctctttgtgaacaattcagcaaaaattctctttccagctgtgagctgggattcatgttgcaaatgttggtgttaattaaaaacatccaccttctacagtttcagcaacaaggaaaaagcaccatgcatgaggtgttcctaagcactcccctccaaagcacttataaacatgattttatttatggcatgtgttgctaggggttctgacagatattattattcccaatcttcagccccagtgaaagagttggggccaaggagatggatgtgaagggcccaaattgccatagagcaaaattagtatcagtggtggacacaagaatactgttcatttcccacaggatccactaaagatgttcaactttctgtattcatatcaggaacggtacgtagctgaaatcaaatgtttatctgttgagtcattaaacgtttccttcacatggctcttagtccttcggacatgaagaagtgaggtctgacaaggccagggacattccacaaaggatgacacaatatattcaaagattgggatgttcgatgacttccctatattcctgttatatttctcaccttattaggaaatctttatctccaatggtcctgagctagtgagatcagaaagactaaactgcatccctctgtgcttgcctctggttggttgatttgtcctgctttaatacatgatccagacaagaaagaatcaagccaaagccacagcattatgaatgaaattctttgtttttaatttcacacagtttaaaatacaatatgaaatcaggctacagtatataaaaaactctccagcaaaatgatgtgccagcatcagctactaaaataaacaaacaaaaaactccgccataagaatttttttgcatttttttttaaaaaaacatcgacacttacatcgctacatctctaagctacctcagttctgatttttaaaaagcacctgcttttcctttttttcatcttgcttctaaattttcagcttttaaaaaatataaattatatgaaaatacaagttggaaaatagtcaaacacaatataacatctttttcatccctatacttctcagcttaaaaaaaaagtattcttaaaaaaaaaagttcaataactgaggcagtattcctgataattttattttaatatatatattttatatatgtatatgtatacatatatttatggttccttgaaacttctttggaatgtaggtaagagttcaacaaatttatatagaccccaacagagtaagcggcatgcacagcatgactagaagagagatggtgtatttctcaccatgaaggttaggcaggttaatgctgtaaaacccagagtgttcatctccaaagtgaggaaaagcacatctgatctttgaatgctacctccaatccccacagccacaaaaatcagggctctatgtaggggaagtccctctccagaatggagaagggaacaaaagtgactctgaaccctaaagccaaaaccaacaaaggttaaggcatctctgggaaaataagggtttcacccagctagaccagatttgcccatccttcctctgaagttaacgtgtgtttttaaaaagcataaacgcaacatttccagtgtataaaccacccaccactcttcctgggatggtctctggcctttggacaaaggagaaaaaacatctggccagatcgacaaagctgtcttaactaatacactatctacaaatcttgaaaatggtggacttagagagaaagggaattttagcaaacaagcgggcggaggagcactaggaggcactttcttatatcttatctgctataggaactgcaggagttatactcacagaaggagagtttccggcataaatttaataggaacggtggatgatttgagaaagtgattttatgcctggttgcaaacagcaagcaataattgatacccggccctggttctactcttacccattattgaaatgtggaaagacttacctagaaatctaaggtattatttcagctgcagttttgcatgtctgcaaacacacacacacacacacacacacacacacacacacacacacacaacattcacacacatgcacacattcacacacacaccttttgccagtgcccaacaaaaatcacataatctaagagaaaacaatgtagtccaaacagttccacccaacactccctgagcagctcctaaaatattttgagagcttcattaaggcacctgcatccaaaagatcaaaataatacagctgggataattctgcctttgctttccatatggatgctccaattcatcagtatggggacactcatgaatcacagagctatgttcctgataattctgggtctgcaagaggatctgggagtaaataacaatcaattttcttaaagatatgctagaaagtagttagtacttccaatttctcatccaaatcccaaaaagggccagccctgagaagcttacctgaaatatttctttccttctctcatggaagtccataaaagccacccctcctccttatcctttcaactgggcaactatagagtgagggagattctaattgtattaggcacttttcctcactagttagatgttgacttttcctctaaaactccattttcagattccccctcacaaccagcagaaagatgactaccttgcttgactatgtttgtatttaaaccttgggggaactaaaaatctattcaaatctcatggacaaccttattttcctcactgaacctccttccttagtttcctttgccttcaagtcattcctctcttctggaattaaccttcacttaccctgtgccaagacatcagacccaagcaagaggccctggcatcacctgtgccattcattttgcatacacagtctcacctgacatcctaccggactaatttaaattcttcaaaggaaagccttgcacttctcttccaaagacagccaagtcacattttattgaaatgctctcttaatttccatcacttctaaaactcagcaagtctaaactcttcaacttaggtcgtgtctcaagttactttttcactcaccaatcagaaagccgtacacttctctctactgaataacagagttggcggtgagggggtgcaaaaaatggaggactcttggaaaataagacataaaagaaaaattacagagtgttagtttggaacgacatgcattcaggacttatttcttaggacctgaggggtaatgcccatgcatacagcttttattccaagtcatctatgctacagatataggactaagaaagaaccaagtcaatcttcctccttcgatctcccttccaggacttcaacagtgctcctacgtttactgtcgtccaaaaccagggatgcaaaatacattcagttcaaagacttaatgcttcttagctcaacattaagtccaaaccccgagaatccactgataacaagtaagtaaagggatgtgctaattttttttaattgtagatgacattcacacacataattcccctgtacccaaatcagcattaattgtccttcttatataagtcccatgaatttgggatccctgatctcagtgagagcgttttgcttttccaatggggtctatataaacagttttctttcattgtgacagaatcctcagccggcaaataaaaacaaacttacatgatattgcaatactgagaccaccttagagcttaagacgatttttaagaaaaaaaatactggcacaaaatttaataaaataaattttaacacaacaacggttttggcccctccccactgaagtccatctttgcttcaaaactagagtgataggtaaatagttctcagattttcagtgcatccccccccaaaacatgtttcatcccacccacctcttttttgccctcccagacctaaaaacagaagcaaattaattgccttacatcagtttcatgagttctgatgtgacaatgtcacttgctaatgggtccacaactcaagacactttttcatggatgatttttaaaaatgattggacacattagtctctttctctgttaagccagagccttcaagcttctgagaaggcccttctccctctcctgaaaatttgctcaagaatttctggtcccacccaccccacaagtcctggctttcctttcccaactgcgcacaattgattacagctgcaactgacttagctcccacccctgaaggtaaaaaatgagttctggaaaataaaaaatagaataacaattcaaaattcagagtccaaccaacacggctgtccttggaaggtctcagcagggtttccccagccccttcagtgccatcactcgtcggcatctggcttgacgtccagcatggcgtgcagctcctcaggggtgtaccccagcaggctctgcaggtcacacacaaagcggtacacgtagcgtttccccgctgtcttgtggatgatgtttttgtcgtaatagtagcgtaggccacggctcagtttctcataattcatcttaggtttgtttttcctctttccccatctcctggccacctgaaatttaaaaagaaaaataaaggaggagtaggcaaaaatctacaagacaggccaaatatatatgtttctatgcctatgctatacccattcatggtgacccatgatgctcaagtaagatgatttgagattcatgtagatatagaaaatatttttcgggcctatctcctgaattccatttttcatgggttgggcaaggatgggagtcacaatgattctttaagttgatgaaaacacagtgaccctgaactaggattaaatatgtgactttaaaaaacaaacaaaaagccacactatacattctcctctttccgcatattattagtaaaatctccttgctttgcaagcatgaaatctaacagggaagtgtgaagcggaggagctgagctgcaatcatacctgcctttcatcaacaggaagtgttttttttccataccagggcacaaatattttctcatgtctgccagaacaaagatgttgtctctcctgttcattgttttttatcctcagaattgggcatggcacggaaccactactccataaacatgtgtgtaatgaaataagaaactaatgagccaatctcccaaggcctcttgaactgtctggcccctttcacactcacagagccaccgggctaggaagaggctaagtcacaggaggcagctctatgggtgataactgacctactgccaggcacgttaatgccttctatcagctaatcctgtaagacaaatggggtaacatagatcttttctctattttccaaataatgaacctggagctcagacaggctacctagcttgctccgggtggcaagtggcagagctgggaatcccaatcctggaacacgtcattcaggcccacgccaccccttccaggagttttctctcatccttcctcaacacagtactcgcaagcccctccttccttacctcatctgggtcagaaagtttgaattcccagccatctcctgtccagctgataaaagactgacaggatttatcagtgagtaattccagaagaaactgccatagctggattggtccactgcctagaaacacaagccattgtgaatcattacaccagatattcagcactctacgcagctaatccccacacacggcactcccacatccctcttctctcagcccatccagccaggagaaaatgaaggcaacagacagtgcacatgtcggaggaagtgttatgagctcgaacagatagaaaagacaaaggcctccctataaaacaaaagcatggaagaaaatgtgtcaagtgctttattttgattaacttaaggatcggttcatttttattgctaaacaaattctagaaagagaacactgtgcctatcctctgggatattctaaggcagcataatcttttacacctgcaaaaactaagtcattatttttgccttcagaagtaagaaacatattaacgaaggaatgaatgtctttgccagttccaaacacaagttatggctcataagcactgctctgtagtagggagcctgtggcccctgatttgtgagtaagaaggatcactatcctccggccctcttacaaggaaatagatgttaaatatctgttcagtcataatatttctctccactgccaccaccctgcccttccagtccacttacaggaaagcacccaaaggaaaaaaaaaaaaaagcatcattactatttgaggaattaacgtgccacccagaaaatcctcaggggtcagatgaggactgtcagaaattctgcataggttcagtatattctaaattagacacacacacacacacacacacacacacacacacacacacacttctctgtcttagccatcaacactctgacagtcaatttattctatgctaaaaggtttatatcacaccgatttcctttgaggatacttttctcatctgaaatgacaatgccaccagtgattcttaatttataggtgtcggtggagagacaaataggggttcaaaagtccatgcttcttgttacactgccccttataacataaacaaactgggcagagcgggactgggaaagacccagtccatgtctctggatacagcccaggaagcaccagctcctacaggaaagctttgctcactaaggctctaatttttcaccggagttgcaaatttgtctgatccaaagtaaactgagatttaacaggaaacaaactttaagttccctctcaatctaaaaaagaaattgccttcataatccataagggtaatgtcttgttgtatctcatatttctacaagacattttcacatgcatcgttgtgcttgctcctaaaatccacacccaaccctctgctgtaaggagaggcacaagtggtcttacggcttcctttctaatggtgcagaaaaagtgctcagcaaagtactgtgactttgctctgagccacggttagcgaaatggtggttctgggtctagtacccaggcctttagactcaaaggaccagggcaacctccaatgaagtaaagaaacagctactgacacgagctatcatcccacagccaaaggaagtcctcctccagtaacaacttcctaatggtggtttccaaggctcctctcagcacttgccacgctaaatatgaaaacatgaaatagctctacctcctctttctgagaatggaccattagctctttaaaactatcttgcaagaaataccttacatgtattccacaataaaatggctcagtgaatgcctataaaataaagtaacattcgaacaacagcccagagggccgcactggtaaagccgtagcttcctctgtttctactttcattcaataaaaaccgtttcgtattcaactcagggacatttgcaggtttcttgggagttgcctaaagtcatgagctacttgttttctgcctgggctcacaaaactaaccgtgacattctcagaggaatccactgagaagccatcctaacaggcacaaagaagtaaaacagcaaatcgctctcaagaaatgcagctgccagagccctggtcacagaataggtttcttggagaaactcacgataactatagagactgaagagagacatgaagaaaaccattctatcccaaagctatgtaaaagaagcctcggaggagagggggttgccttagaccctgacagagaaaaactaatgagtgctatgcttgacggtgcacctactacgccgcagacactgtgagtgacgctctacactcgtttccttcattcctcccaataattctgtggggtggatgcaactgttgtgctatttgtttctaccacttcacagcagagaaaactgacacactgcaaggccatttagatcagcagtggagtagccgggactggaacccatgcagcccatccccaggttcttcatctcaatgctacgttgcccctggacaggaccaggccaaaggcctggcatctaaactgcctgactgagtgcaatgttccaagggataaggggacctgacttgaaaaactctctcccctacttctcacagcagttgcaggacacgggatagccagtggttctcccagtcatccgaccaccagtggccgtgccaggccccgccatggcatccacctccacaggagatatttccagcatcctcttgtggtagccattatgttacattacttcattgtttctccttcccaatgttcacctttgaacctctctcccactatctgaaaatctctttggggcacggggtctcatgacaccaagccgaggaaagggatgggaagatcgagatccttcccccggatgagtctttggcagggagctgtcagcacatctgctggtgctggagaacagggcccaggagcacactgcagtctcctgcccttgggacttggcagccacaatgcagagaagggaccttcaattcccgtggtttgcaccagctcccagaggacgaaccctctgacggaatggttagttttccttttctaccagtgcattttccaaactgaaatgtcaagcagtcataggctgtagatgccctgccctgccctttctctgtgatgtcagcatacgggacccggtgagtctgggacagggtgagtactcgtcagaggacttttgtcctcattgtgacttttcctttgttcaaaaggaatgaaagaaaaaaaaattaaattcaggccctagaagcccaagtcctaggtgcagagctctctaactcttttttttttctgtttacacccaaggaaagagggaggatagataggaaaagcagatacctaaagaaataatgggaatatgaatgggaagaaatctctcccgttggcttcataataggacagtcaacataacagagatgtcagttcctggctccctcccccgattcctgtagagaaaccccacaggcgcactccagcctaactggtgcacacagggctcacccttcagaaagcccacatttttgtaccaagtgagaggagttcatgatggccgctgaagcgtcccctctagcacctttttgctgactcctaaactgcctttttgttgtggggagcaagagaactaggaaagacatggaaatgttcttccagccagaaacactgggccagggtgggcgcagttcctggctgggcccgtggatggtctaatacaggagcctgtctccacagcaatgcatcaccctcacttcaggtctgggaggggacttcagggccacttggaaacccaaagcttagaggcagctctggggttggaaggcacactggctacacagatccaccagcgacacccacatccaggcccatcagaagttctcacacccaagattggtgcagacaatgaatgagtccagcactcccagttacgactcttctagagggtgtttctgtgtgcttagcggaggtctgcccaaatccacagggctccaggaccccatcccttgcccttgctccaacatatcctaaacttgtaaagcctcttcctccattccccctgcaactcccccttatccctgtgcccagcctcttccacctacccaaatggactgtggtctcagtgacctttgtcccctagagcagaaaacggtactaataatagcgccagtcatgggaaggggagctcacatgttcaatgtgactcataatggtgtccctgtctgggatctccaaggcagtcaacagcacccttcacgatgctgcccgggagtgtcacacatcaggaatccagtggcatcactgggaaagtatgcttctcaagtcgaagctctgagccacaacaacagaggggtccctgttagaaggaggtctctttccagagccatgcgggcgggagagcaccacacacacactccacacacccatctcccatggcacggagcctccacaccccctgctgtctgctccctctccaccctccctctcaggcggctgcaggggaatttccttctactgctttgttcttctcagcctctggagaagaggacagttcttactacacactgacaggtctgatttgaagaacgtgctacaagctctgaagaagaaataccaggtaggaacttggagagctcccaagcctacaaagcaaatcacaccaaggatgttcaccccctaaggggacccccaaggctcctcaaatctaaggcaacaatctcactttttaaaaaaagtaaagcttcaagtaaattactgctcatttgggtcatatttccttgtctgggagctgcaaggcccactatctgtctcaatgaggagctggttattaaaaatcccctgctattctggtcccttgccctgaggctgagaactgagcagcataaatacatatatagcaatgggctaggacaaggtgttagtaacatgctcttgatggaaatcccttccatttcccgatttgtcagtatcattcttctcattttccagatctgggagttgcctgcctgtgacaaggacatcctcacagcaagtgaacagggtcaggttgaacttcactttttccttctactccttcctcatttccatttcaaccacaagttctcactcttgtcacctgtgctctgctgagaggagaacacaggagttttcttccaaacagaaggaggtcaacgctgggcaggcaccttcccaggcagtctcctcatatttccatagtacatggcttacaccaagaccaccccattggtttggtctctgtccatttctcccatcactagaatatatgctgtaaggacaaggactttgttttttcactgcttcaacccaaagcctagcacagtgcctcaccaacaaacaccaacaaacaaaaaattctttgctgttgaatgactgtgtcatttgacatgttctccctgagaacacagactatatcttactgagccatatatcctcaatgccaggtatgatagcttgtcttcagcaggtactcattaaatattttctaaattacattactgaaacaaacctcctctgaagaaaggcatatggattagaaagtccgctcaaatggcttctctctattaaacaatatttggggccaaacaatatgggtgaccctcaggctgcatttcatcaacgtgttcccaaaaatgaaaatgactacctgtcctttgggagttaatttgctactttaagaagctaatccctttagctctattctaaaagtcaaatcaaatacctcggtgtgggcaggacaccacatttattttaacctatgaaactctcatggttggtcacccttgcaatagggctgactctgccctgatagcacacatctggcaggtggccctaaaacagaggaacaggcctgctggcccctcccttccagccaggtgtctctacccacagccaaacgatgatggcaaaaacagaacattcgaatccagaaatgacccatctgttcacaagtgtatcaatctgcctttcatgctaccacaggaggacgcacctctgagggtggggtgggtgactccccagtccaagcatcacccctttctgtcaaccctcttctaaatcaccattcacaaaggcccctaaatctcctgatttccattaagtttaaggacaaaacagaaaacatcctgacagtttcttggcctctggaccaagctcaacctgaagctgcacaaagtcttgttgcctgaggatgaataactcaagaaactgtattgctggactgactggcaatcaagaccctgagaaaattattttaagaagattaagggccaggagtgcttgatattttggctgagttctatgtctctcatttcttctgagttgtatattttctttgccccaccctgacccaatcttatctcatctctaacacactccatgtataacattctataactggccaatacggccgtggtttaaagactcactctgtgtcagtatattctataaacgtgttcctgtatcagtggctaataactcaagggcagtgattgggaatataacttccaataattcaactcaaacaacaaagaacattctgacaggtgtttggaaagcatacttgctgaacacgatgatgaacaaacaacaactttataaacttgtatttgttgctgagatagccagtatctaaccatgaaaaagagtgagaaaacagctctcaaatcagttaaaaccagtctttgactgccgagttcatgtctcttgcatgttagatcaaaaacgaaaggaggaggagtgtcaaaaaatttaaaaataaaagccattttacatgtcaggcagtggagtactgagtgatgacggcatcctataaaattaaaatatatgatgcctgtgggaaagccccgggtagggagttgagggtacgaggctttgatatcagttcttacctgaatcaccatatgcaatcttatgcaactcatttaatctctctgggctttactttttcctttcctaaaatggaaatagtaatctctgcttctctttagtttataaaaatgtaaattaagtccttattacaaaaatctgcatatatacatatatatagacagagagagagaaagacacttaaagaggtgaacaatttaggagcaactgaatatacaataatggaattacaaagaagaatgaaacaacagaaaatatatttttaaaaacaattttcagtaaaaaacaagaaaaaagatgcatttaaaaaaaattgtaaaagcactagaaaaaatctaattagacttccaaggattaaattggccttcgtatggcaactttgaaaaagtagaaagttggaggttaaggaaaaaaaagttacagtatacgaatgtaaaaatttttaatattttcaatgagaataagcatttaggacttttttaagttagggaagactctgaaatccttgttcccatgttaaaagtgcacacgcaccaaaagagacagcagatgcaaactgctttgcaagtgaaagtatcacaggcatatatggtttagggaaatcttggccacagatggacttagatcctcttttcccgatgcacctttttccttagttattcatgtccctcaccaagtattcttcacctaagtattgtatagagctcacctagagcaagttcaacaccgttccccacaaatgccaatagtttgggcccaaagagacgggtcccaccagcattaactggggttcaagcagaacctcttgtccagccatcagggcccaagacaggcttgacagcaagaccaggtggctggcaactggccagtggagtcctcccacctggaacagggttaagtgaggcttatttggccagtctgacttgggtctgagaacaagacagttacacatttttagggtatgagggaaagacctttgtttttgctctggctctgcacacctgcaagtgctcaagtacacatgtgtgggggcggcagcaggagaaaggggactgttcctctcttaaaggggcagtctctattcaaatgcaaccacctctttcttctaaacccatcagtaactctgtctaacacattcaagctaacactcagacacaaacttggacagtgagccagtgaagctcaagtcaggaagtgggtttctttatagctctttcctcctgatgtcttctaggtaaccggttcttttaagaagtcaccagagatgggttaggtttggatttgggggaaggggataagaattttgttataaaccaaagaaaaggtttttccagccactataaatgtacaaagaaaaatcttcctaagtgtgtaggtaatgagaagaaagaaagatatgttcactgatcagggttagaaaacaggactttagaagtctgaagattatagtcttttctcagtaggattctcaacttgctctctggaatttattttatcctaggggttaagttttccctgcatgtcaacaatgagagaaatcactagttaggtataatagaatccttggaaggtagttgaactagatcctaagtgatcatttgcacaccgaattttgtaagcatttatccagcatataatctctgaacactcctcaaacgtagccagagtgtgttgaatagcaaaacacaatattaacaactgcatggaggtagcggaacaagtactttttgtttcaccataacgtgataagctgaaagtgtcctacctacgcctttaaagaaaaaaagaacagagaacctagccttgagaggcctccataagaaactccaccgcctcagctctgaatgtcaaacacctccacagacctgtgccctgtgagcatctccaacaaagcaagtcccatccttgtttcagagtttaaactttcacattcaatcactctaggagaactttcactctcattatctctcagggagaggtgagtcatacaaaagacaataaagtttggggagttacagtcaacaacatgcattgaactcagaagcccatcacggactactgagagtgtcgggacacatggtcttgagtcctgccacatggaaaagctgtgctggtctcaacaagccatgtttacagctcaggtccctgcagctgtcacactacctgttctactcagttctcctgcttcagggaacataattgactggctctaccatgtccacaccagcacccctcatcctggggactgctccagccagggactgagcacagtgagggcatgcaggtccacccctgtgagacacagagctcctccagcagacgaccttgacccaaagatcccctgggcccagccaaagttttcttagaatggagctgcagttgagggctctttctacccaaatctcctccttccagacctgcagcatggtctgaaggttccgctgccttctcttcgctgcctttttttccttcatagatgctccttccgtaaacatcttgcacatctaatcatgtcttggcacctgctttccggcacactcaaactaacacagtattttgaatattttctgacatgtgaaaaccctgaaagtcatcttatttgttgtttgctgtgtaacattgggctagacctcctcctctaaaaagaaaaaaaaaagtctcgattccctcatttatacaatgggcataacagaaacttcctcatgtgatatttggtgaaggatttaaaaagtcagtgtatatgaaggagtctaagcacacagtaggaacttaatacatctgggattgagctaaataattgaaaagacctaattattattaaatgcctgctacgccccatgacactgccagcaattactgcaattctataagtaaaatgcgttgttccctggcctcaaggaacttagaattatactggaaaaataaaaggtttggagaatactatggaatgtaggtgacagctagcacttagagcctagcttcctgtatacccagcactgctccaagtgctctccataaactaattcattagttctcacaacaagcctatggtatagaaactattattactgccatttgcagatgagaaaacagatacagagatgttagcttgccaaaggttacacagctgctcactggcagggcctgactccatgctctcaattctacagggatggcccctgaatgttgcccttggtaaaactgcatgggatgaccactctttcttgtgtttaacttggacttctctacctgcaggcatccccaagtgactgatggggtgctgatgagtgctccaacctgcaggcatcacatgcaagtcaccttagggagacaggaagggcagcgcttctcttgaatgagcctctacaaagagcagcagctgctcactctctgcagcaggggaggccgtccagagaaaagaaagaagtgccaagggggcaaaggcagggtcatctgggacacctggcagggcctttcccaacagaggtgatggggagtttccgaggcctgttgtttaaaggcaataaagactggtgtggatgtctcagcagcacgctggctgcattctgctcagtggaaacattttgcttcctccaaaggtggagcttcaaactggagacagagtggaattccagaacagtcaccacccaattccattatttgtagtgagactttattaaagaaacagtgaccccaaaaatctaagactcagagactcttcctctaaaacaggcagtgggctatacccagaatagaggggtcaacccgtgagtctcctggtatccaaaatccaggcaccctcaagacctcagagagttgtaaacagcaccagggtgcaggatgtattgtacagtatgaatagatcccttctgtccaaagactgcttgcaaggtattaccgcagctgaatcaagacactaagatgcttcagccagttgtggtctttgaaagccatgacagaaataggcaatcaccactttccacgttttttaaaagacatttagaaaaaaaaaagttcatagtgaggacgaatctttttaccatgtgatctttttctactggtagcagatgattaagaaaaattcatacaaaactaattagataggaggcagaaacagtggaattactcacaggcaatagaaaagagctttgcctcccaaccagttcaaatcttcccgggaattttcctcctcagtgctccaaagtattttcccgtcaatcacataactgagcagcatgtgagtctattactccactgagatccccaggtccacgccaggcacccctttaggatccactgctaaacccagcaccgtgaatggaatccctgccagcatctcagctgctggctgacaggaaggctctatttaagctgagggggctgccagcttcctgcaactagttaatcacaacagcctctgagcaagaaagggaagacactctgtttctgcccttctcattcccaagctcttttcctcttatccaatcaggtactgcccaaggatggtctacattgagactgtgatggcttcagcaagcctggaagccagccccagctttgcctggcctgcagacctcagtgaaatgccctaacttctctgggcctgactttagccaattcacactgtcttacacaacagcatttacatggagagactttagattccagagcttcgctcctgttatctccccaaattaaaaggctctacgctgttcctaatcacatgcccacagcacaaattcacactgcactagtaacctgcttttactctttccttatcactaacttaggctcataccaaaagtttcctcagttgttgtttgtacctgaatacattgagattattttgcaatcgagccttccttcagaaaactgtgatttcagctaatgctgccaaatctcaggtttcattctgaactgaagggctttgaagcacttccttttgcagtaaagttgtttattttcaaaaacatgttttagcagtagttttgggttactgatccctaaaactcaactacgagccagaactctaaggttctggacttggccctgggactttcttattgtgtgactttagactggctctagagtcatctatgaaatgacaagaagaggatttatttcagggcagaatcaacttgagaggacctagaggagaatgcacagggctttttttttttttttttttgagacggagtctcgctctgtcacccaggctggagtgtgcgatctcggctcactgcaagctccgcctcctgggttcacagcattctcctgcctcagcctaccaagtggctgggactacaggcgcccaccaccacgcccagctagttttttgtatttttagtagagacggggtttcactgtgttagccaggatggtctcgatctcctgacctcatgatctgcctgcctctgcctcccaaagtgctgggattacaggcgtgagccaccgcacccggcccggggcttcttttcctgcaagactagtacctttgtgtgtgtgtgtgtgtgtgtgatgtctcacacacacaaaaaaatttggaagttgaattccagatagtcccaaatttagccttaaggaaactgaaggactgcctacttataaatctgcataacaccataaaacataatttcattacagttagtgaatggctttgggtttagcctttttcaggctcctagaaaacaagaaaatcacttcattcataaatgcaaatcaaagagtgagaacacacctagacattgataagggcattaccaccagacctgctcaacaacagctgcagaagtgataggactccttatctgtggctatgtctgacaatctggaatgaagttcaataaaggtgatttataggtcaataattctggacggaagccaaggccagctctcttccctcccacatacccctaacccacatgcatatagtgttcattagtgacaagagggagataaggtcctaatcagtctaggcaggcaactgcaataaccaaggagtactctcattatctaatatgaagaaaagattttctattcaggtgagacatttggtgcttaagattcaattcagaagctacctctgtgcagaatgcaattacatacatggccttgaataagtcatttttttgtgcctcagtttcatcatctatgaaatgggactagaggggttgagaggaagagagactactatgtgacaacccattatattattctatacctactgaaatggagaagcaagaggaagaagagatgcctatgtttttcaaggacttggaaagcgttttgcttaggtctataaaatgtatatagaaagcattgggctacttctctaggactgtgttgtaattagaaggggttcataatgtatcttcgaacaaaagaaaatggagctttctgatggtatcagtttgataaccgtaaacagttcacagtaaggtaagaaggtacattttggcggaagccaacattgcatttgatgtattcttaactcagctaacaggcaggctttcaagccacgttatctgcccccgcatcttgacctcatttaacaagttgctatgggagcccagtgaaggttgatgcaattttcttatctttggaggaagaatgtaactgtgcaggagaatgtgaaaattcagtttctaactggcttccgcacttacagtgcagtaagaaagacatcctatcaagaagtaaaatgtattcctttggacgtgatagggacaaagacccagactcctggtgaaatggcagggagatggattctcttcccagcttggagaatctaagcatgcaccctttagttcaggccaagtaatagtgacatagagctatgtgtacccctactgtgtggccaaacatactctggagcaatcaaattttaagggaacagacagaaaagttgagcagaacctgagaaggtgagtgtgacttttacaagcaataaaatgtattgccaacaagtctatacaatgatttctgctttccaaagtacttttgcaaatttcagctcatcttaacatgtctgcataaagctagacagccatttataggcactctagtgactgcctcaggtggtgggtgaggctgtatgggcacatttcatccgcttccctattccctaggacgcatcttaaatgaggttggcgggggcaccatgagggtgtgagatcaccctcagagggtgagtctgcagtacaggcaggaggtgttcaccaggtatcaattacagggaaaaaataaatactaaaatgtgggctgctcctcacatacctaacaaatcccaactttcattcagaccacaacaataggagaatccagttcaagtctaaggatatttaaaatatcttgaatccaaggagacagtgagcccacatactcgcttttctgcactcaatatgcgctcaaacatttgctgaaataattgaattgttataattgagggtttttttctctatgtctagcacaatgtctagcattcatttatttaattagttgatttaattcaattacactttcacagatttcctgccaccaagataagaatgaacacttctacttcactaaaagtagaaaagggtacaaggtaaatttgcctaaaaccacacagtgtgttagagttgggaggaaacacagaggacttctgttttctggactattattctcgccatcacatgagatagtatgaaaagtgaaattgcaattgtcaaggagaaagaattaaatggtaagaggcttcaaaaatgttttttcattaaaatgattacttcagactttgagacttttaagagataatcaccaccccttctcttctactcactaaatgttttactcccttatcccatttctgaagaaagagagagagaaaagaaggaaaggagggaggaagggaggaaggagggagggagagagggagggaaggagggaaggaaagaaggaaggaaggaaggaggaaggaaggaggaaggaaggaggaaggaagggagggagggaggaagggagggagggaggaagggagggaggggaaggaaagaaggaaaggaggtagggagggagagagggagggaggaaggaaggaaggaaggaaggaaggaagggcagaagagagggtgggcaggcaactatcaatctatccaaacataactcagacctagagcatagttttctctgcaccacaaaaacagaagcaagcactgccaattagagataatgtctacctcccaaggccacaaagtcattttagagctacctctgcctttcctttctcttcccaattaagcagcacatctcccttcctttatcactatattcaactgcagtctagttctttaacccctaacaggtataactgcatgagctggcactcttgtacttcctgagagtgacttaatacacttttcctcatcccagacgtttttaatggaaatggatatacttcctaataatctcctttcaaagatgggaaaggactcccttgaaaagtactaagttcctacatgctagccatgttcaagcaaagaccaccagggtattgtagaaagaataaagtaaggacctttaagttccattcctggccttgaccttgttgctactccaacatgtagacataattcctgagcactactcatgcaatgaactgcactaggagctacatggaatgcaatataagagagatactcctgatctttgaaggaggagtaagttttcaagcatttgagttgttctcaaaggtcactggttttcttcataaaagacctaaggcttccctgaatgcaaaaataaggattcagcatactctaaggatcagagagacacctcaatagaaacacagatcttgctgtttgtcatcatccacacaaagggtccctacatgaaaacatatccagggtggagagaattataagagaataaaggcctagaccacatctgagtaatcaaagctactttaaaataagctctactcacaacacactttctaatttttagaaaacactacaatcttacagagagatctgatgattaacacattaatgctccttggctatttctcagatatactctccacatgtttttctggttaagtagcatgatatgctacaacccatttgaagaaagcattgttttgctctactaccagagtctcaatcaaagttcaagctctcaacctacatcttcctttctctatggcctttcttcacccatcactatcataactatagctttcgctcctggaagaaaactgataataaagccgagtaagagaaggggcattctctataggccaggatggatctggacagggcgtagtgccactgaggatactgttcccacatttgaacagctggcctaaggagaaccgtgctgcagaagagtccagtgcggaggccattcagttgtgcctttgagagatgctgctgctgattttgtatttagaaagacctcccaagagcagaccaggaaaaatcccctgatgccaggccactagatagagtttccaggaacaccagatcattatagttcccttcccccagacatggaaaaacacccaaaatgtaagtttcctaccattcttggaaatgatccctttgaagagaatgatactatttgcttccaaaaatcaatggctattcacaagcagagtggctggagagagactaaagaattcttagagagacttctcccccgtgccctgcaaaagggagtctctcgtcgtctctggtcagaggtgcagagtgccttccaggaccccacccacagaaacgtgcagatggagttggcctaagcagcgggagggcgcctacctgtgtagccagctagggcagcagcaggaatgacaggcttgtccttattgaggtcagcacggtcccgcacatagtccttgaaggtgcccttgggcttgtggttgggcagggcagccggatagtcctctgagtcgaagctgtcataggagggaacacgctgcaggctgttgaaagatgactggctgctccaggactgggtgaggcgatcacaactatcgtagctctctatgctttcaaaagagtcctggcccccgagtttacctggaggtaaaggaggaggtaggaagaggacagggggaggagggagtgggaaaaaaaaaaaactgtaaaaaccctcttatggaggacagattgctaatcagatctgcaggaaggacggaagaagggagaggcgagtgggaacagaagcttcaggggtcatgggtttactctgaggaaaggggctgcactaggccaccatccgagggtccacggccactctgctgcctggtttgagaactccaagtacagagattcagagtcaaacgttgctcacatctgtcggagtagcgtttgggtcctcaagagttctaaagccagaaatctagaagctgaggatcacacatgttatgatatgatttctggctgatgtcgtaggcccaatgaataaatgaagaaatcagagcaatgtcaggctgaattccccactccagctcaagccaatgagatgacttcaaaaggcccagtttggaaaacattttggtcataagaaaaaagaatcccattagactaagagcagattagcctgttttgaccttggaactaagtgctattttttagcatttttcccaaatactattttaatatgaaatacatgtactgaccctatgccttttcaaatagagtaagatggtgtaagatgcttttcccaagagattttttaaaatcacacacactatcactcttctaaacagaaaaccatattctttatcctctccaagtaaaattatgtacttgaaatttaaacttcattggaaaagtgtaggcaatatttaaaaggtttattaaagagttaaggtccacagcagtgtcagaaatcctttactgtgtgagttgcttaaggcattcttaactgaccacaagatcatgcaagttcattaatttcccaaaccaggttataaacagctgctatgattgcacaatagctcctggagaaatttccattggcaaaaatgccactaaaaaggaggctagcaaaaaaaaaaaaaaaatagttttggaggaaaacaaatgaatctaagagcgaaaaaggctcgcaggaatggtttttatatgcaactttcagatacttttcaagtaacctaagttaaatcataggagactagatggtcacctcaattcagcacaggccaaaaggcaaagggatgtgacaaatgtttacggagaaatatccgtaagtcaactcttaattgttcaggggtggttgatctataaatttcaaatcccagaataaggctgacttatacaacttcatattagtgtgcctccagtgtatttttccctccatgacagcggagattggttaaaacaataaacatcaaacatgaacagatgcccaaacctaaattaaatatataggaaaatatgttgctcccaacattgtttaaagatccggataaaatgtattcggttgagtgtgtactttttgtaaaatccactgctgtgggttttctctacatcctgaccccctctggaactgctttaaacagaaaggtggtgtcatccgtttcatctcattccttcctccactcatccattcagaggagggtaatctctggaaagcaaactgaagagcttcatggagttatcagccctgcccacccagtccactagcaaaagggcacctcttcattcttactaaaaatgaatatatatttctttataattcttaaaaattctttcccatttacccaccagaaaagtcatctttttcacctttttagagatcatttaattttctttcaagaaattcacactaaatgatttaagaaaacagcctacaaccagaatgtcaaagccttgttttagcagaacaggaaattctgtggcgtctcataaaaaggtatttgttcataccagctactgatcttcatggtcacttattttctctttgagacaaacataccaaaagcctaagaaggagaatttatattttcatcaacaccgcaccaagtcgatagtatttatgctaaagtctctctgaaatgattccatttctatcagccaattttatacttggagaaaaaggacatcagaattttcacaagcaagatagtagagtttccaaggagtcccactaagcaaggggactaaaccaagccagaaccagtctctggcaaccccccaaacatgaggcaaatgcaaccctgttgagagttgtggtttacagcggtaggcagctttcattttagctcgatttcacaaccctggtgctgggaaccttcatttacgggtattttctccaaaaatgggtagaatccaactggattagatactcagttatgctgctgcgctcatgtagggaaacctgtgttctctaaactgtccactagccagcctttctgagaagggcctcggcgagctccttccaaagctatctgagtccaccaaacagacctcagagcactcaaaacagaagatgcggcagcacccagccacccactgagtagactcgtacaaagacagtccttagggcccaaataagtggggcatagaagcactctgtacgctgtaatgcagcccgtgaatactgtactatggttagtataaataacaatcagctaacagtaatgctttcggtctagaccaatcacagcatctcagaatcaattggccctttgcataggccctgtttgcagcacttctaacatgcagaaaacagccctgcacaaaatggtcttcccctcaagtttctgtggcctgaacttggagggagggaagaagagtggagccagaaagaaatacctcatgtctccttgtaagggtcacttttggtccacagtcattagtttggggttggaggggtggtagggaccaaaaccaagaatgaagaaaaggagagggaaagagacaattacacaaatgcaaagccagatgcaatttcaaaacaatgtgacaggagatcgacccaaagttacaacatggctgagcccaaacccacaggcttggcctcactgtgtagatgtacagaaagtcccacaaggaagaaagtcgttttaatgctttgactcgcctgataaaaaagaaacacatgtacacacacttgtgtgtatgtatttaaatagacatgcacccaaaaataaaaaagagccagaaaggggaaggccgactggtcccacccatccccttcggtctgaaacactaacaccctggggccttaagaaggaagattaggggttctgattttgcagggactttccctctgcagggcttgttggtgatccctaggcctgctaggaggaagtgtgagtctgaatactcgaagaagacgacaatgggcatgacccatgattcttcaaagtaaaggtaccattgggctctcctccaagagcctcacaataggcaccgcatatggtcagtcattgagcagaaatcactaataggccagccccagcctgacatctgacccaagccccgcttgatcagctttctcctgttcctcttcccatttataattctttcccatttacccaccagaaaagtcaggtttttcacctttttagaaatcatctagctcttgctaaatagacaaaccctttcttacaatagattgcatttttctcagaaacaaaacaatctggacactttactaggtaggctgtacctctgagtgtttatgtcctgttcctaaaaattgggtgcattttaccttttttgctttatgtcacccagctctatttttaaacactttcttccctgacagtgaatattttatcactattataatagtcacgttaacaaaactaccttcttttggaaacccctggccacctccgtccctggtcctctagctaaatacacacttcaccacactgctgatgactggttccaaataaaccgttggttaaccatcttgtatcttcccaaaccgaaaaagtcacaggaggctaaagatcccaggctggccagcagaggtcattccaggtacccagctaggatctacagtcagacccaggagtcctctgggaggagcaccaggacacatgctaagcttaagggttttccagggtggccacttgaaccatttttacttgattatgtcctcctcaaggaaaatagagcatacctttcaaaatgaccaaattcaactagagttattgagtaaaacattttgcccaagtaagatatttaatttcttagattgcctgattttgatttcactgtggaccccatggcctttgtcataataatggacttggctaaaacaccacgatggaaagttcttagtatctggacactctaagatgggaaggctgaaactgaggaatctacaggtctaataaataagaaaaaaaaaatggaacctgaaaaaaactcacaaagtcaggtaattcttgtaaacccaagagcttttagagaagaaatatgacctaccacgactggtcctccccatgcacatgttgtctggggtgacgacttcttgtttgatagcaaagtagtcattctgcaaggtgtctgtctggagagggtctcggagaatgaccgaggggtagtcattctcatacttgagggagaggagctcttccgagctgatgggatggagcgtctgataggactctgtgatgaagctgggctctgagaactccgatggtggaacacactgggcatgctcaataccatagcctggaaacaaagggtttgcaagtaaagagaggagagatttgtacctaaaataagcagttttcaccatctacagggccctatgatgtgggacaagctccttagagaataagggaaaatactttaaatcagaaaagcttgcatttttaaccttgtccactactaaacagctttagcccttgacaaggtaattgatttcctgacttcatatcctcatctctaaaatgggggtgattgcgatttttcccggagcactgtgatgaagatgaaatgaggatagaggtcaaatgcccaccaacattccccacacaataagctcttgacacagagtagttaatatcattgtgtcactggaataaaaattgtaataacgtaaaaagataaaacgaaaaaaataaaacctgtttcatattccctgtaaaagcacagccatcagataagatggtcctatatctcagagcttacattagtgcaacaggcctacattcattgtttccctcaggccatctcttcagtatggttgggtatcttacacgaaaaaggagaagactgtatttcctataatagaatttgaagctgcatagcacactcttaaagaaggattttggaggaaatgctgttatctccactagtaaaaaggaaagaacaaagaccaagatcaaatccctaacccaaccctcttttggccatcgtagtgcacagtatcaaataggaacaaaagtttaggggtctagttgcagtctctctgcatgactttcaggtgaagacatcagagaaggatcctagtgtgtaggaacttggtaggttaatgaaacatatatataggttgaaactttgtgctttgtggaaaataataaaataaagtaacaaagaagagtctacatctaagaagatattatttttgatagaattaccatgaaggagcctgagattcactgagataggggtcttttcctagtttgctattatcatgagagaagaggggtagaaatgaacttactaatgaagtaatccgaggtatagcgggattctggataggctgggttgactccattaacttgatatggtttcacatcctctgtaatgaacagatagggaaggaacaaagaggtcaatattcaagtcatgcttggcctaaaaggatcttggatgcaaagaccacaatgatctcaaccccttttctaagaaatctgcatactcattaactgggttggtatctgagtctgtcctgactgtggccttgtctaaagatgagatcaaaaaaatatgactaaggttattatttcagtagctgcaaaatgggatttagtatcttggaaagagaatccatgagtaatctctaagggctcagaaggcattcagcattcattctcaatgcattcgtgctgcgtgtatgtcgaccacactatagccaaaggcttgagtacatcccaggttagcaggatcaatccccaacccccaaactaatcaatttcaaaatttctcaaaaatatattgcagtctttaggccatagattttacgttctccatttcctctaacagatgtctggtttttgttttgtatttttcccattgccctcaggtttcaagttcaggcccagacaagaagcaggacactggtaaggtgactccatttggtgaaatgcgactgcgcttgtgtcaagggagagaagagcaacccagtcaagctcctgcccagatgccaactcccctaggaaaaggagaggaagggagacgaagtgcacctgcggacagaaagctctgaacgaccctgcagtaagcctgggatcctctaattaccctggaacaaatgccatggctccgattcttgtatggagtagtctgattatatttcaccataagaatctgacatagagtatgggtttgggtttttcctcaggtatttgatagcttgttaggagcaaagtctgatgggaaaacaagtttatgcctgcacagaaaaacagttcccagttgagataaaatgattaaactttgctttagcagtttatcagattgaaacatccccgtacctttcaccttccaccccaccccaaacagctatgttcttttgctgctgtgttgctttaattacagaacaaaagctgtagcctcagcacaaacatcatgctcatctcttcaagtaactgaacctgaagagggagaattctttctgcctctctcaacagaatattgggtgggaagatatgacttttgctctcaaacatactgacttatatcctaattctcttaaattttcttacattattcctttaccctaagtgaggccaaaccagtcttagcggccagaaggcccctgtgaatccacattattatacaaaaagcacaggatgggatgttaaattttaagttaaataaaaatatattgagggcaggcgcggtggctcacgcctgtaatcccagtgttttgggaggccaaggtgggcagatcacgaggtcaagggatcaagaccatcctggccaacacggtgaagccctgactctactaaaaatacaaaaattagctaggcatggtggcatgcgcctgtagtcccagctactcaggagggtgaggcaggagaatcgcttgaacctaggaggcgaaggttgcagtgagccgacatcgcgcgactgcactccagcctgggtgacagagcaagactctgtctcaaaaaataaataaaataaaataaaataaaaatatactgaaagttgaaataaaatgaagaaaaggagatgagtgatactgaagaaatcgcctaccctgagcttcattttacagacaaggacaataataggacttgtccttactatctcacagttattttgataatccaaagagaaaatgtatttgaaagcactttggaaacagggagacatgatagagatattaattgtaactacaatcagagatgggcttagatagcccaaaacacctagcagctccattttgataaatggaggaaaacagcctcttagtagaatatactgggttacacagtctgattgaatctgctattgtgtttagaagtcaacagtcaaatcagatctgttaggagcctgccgtatcgtttccctctataaacaggtcgctcatgtcaacacctatgagtgggtgtctgtgcatggagaacatgccggtgctttgcaactgcctgccatcctcggtaaaagcagccacagaaagactcacctagttctttcctgtattcctttatgtcttatttttcaacagaaagtgaaaagaaggaataaagataacatttttgagcacagagaaatctagtttgggtctctcttgagcactgcagaatggaatatattcttaaccaaaggaaggtataatgcggggtaaaagtgctaatcctgagttttgctcccctcccccagcgtctgtgccaagggttagagctgatgaccacagggaaaggatgggcctgggttagagagggcaatgggcttctaggcttacagtcagctgaagggcactgctgactgctggtaactgcaatttattttaagaaaaaattcaaaaaaataagcacaaaaacacccaagtttgccgcctgctgctgtttctatactcagccaggactgtggtacatgagtcacttggtccaaaaaggttggaagaggctgttaggggaggccatgtcattataaggttgcaacatagcgtcctgatataaccccagttcctgctccagatgtaaaaggtatgatgcactactgcaattccaattcagttagtgggcagagaaatctgtcttattaatacggtctcagacgctaagctttcccgggatgtgatgaggtattatggggcatgcatcaaggcagtgtgtattaagattgcagaaaacaaaaacaaaaacaaaaacaaaaactattcttgggttggctgtgggcactgcttgttcaaccagggcatgggtttgagataaggacctggattagaatgttgcaatccaagaagcttcagtggtacaatcttgctgaagattaatatctgaacccccaatatgtagaagaaaaagaaattacactcatctaagagtacctgctgtatgctgagcagtgtactaggcacattcccacatacgtcctacagtaggacacccacagataaaggcattgacgtcccaccattgggtgagccccctacctactctcacagcaaccccacataacctccacctctctctgtttccacatatttacctttctgcaggatctctagatgttcccataagatgtccccaacaaagtctggggccagctcgagaaagcagtctttacccagggcgcagagggctgctccattcatacagaacttctggaagtctacacctttcaggctgaattcattcacagcccacatcacccagtcccgaacatgggtttctgtccactgccgggggtctgaggaaagagatcagatgaagatccagcaggtcgggcttttaactcctatccaagcctcagagaggacactgaaggagctgaatttagctgagaatgctatctttattcatcgaatgaggaagcatcagcctagcctgcacatcattgagtgccttccataaccctcccctccatattcaacatctccgccttctctatttcaccagctaggaggtcactactgccagccaaaaagtaccacatgagtattctctgtccttgcaggcaaagatttccatgaatctcctctctcactgccttattcccattggacttttttaaagccctgaacagaacaaatggcttctttaatagcaataataacaagagattgctcatgcctctccctgctcttaactataatatacttgagactattattctcgattattttttatcttagccaattatagtggtaacaattgtagcaattagtagtagtcattcattcaaatggcacttggtaataacattattaggtgcctgtattataccagatactctgcaaagtctgtacttatcataagctatagcttgagtagcactgtagtattgataacatgcaatcttcatacatgacctgaggtttaacctggctacacccaccaatgacacttagaagttcagatgacagcaggtgtaatgcccaacatcagagctgttccaagagatccagaagtgattctagtgtgcaggcaagtttgaggaccactgtcttcataccaagatggcaagaacaagcccaggagacggggcagcctcagtatgtgtgtcatgattgtcctaacagatggcagccatggcccatagctgctgactccaatgtggttagtgtaacgtctgcctcacacactccaggtgagaaaatgtgtcttcccaaagggtctgaccccaaccactctttttccaactacaaaaccataccttttgggatccccagtcgttgctgttctttagtgaaaccactgaaagtagcttttaatgcttgagacatcatttctttgctgcttggagttaatagtgggacatctgcacattccatatctgcatgaaaaaattgcatatgaataacaaaaattacataggtaatgaaccaatcataaaacattacaaatgggctgtaagaaggcaagctgagaaacaactgtgctagcatcctcaccagagcaccagagcaggcaattttttttttttttttttttttgagacggagtcttgctctgtcacccaggctggagtgcagtggcgtgatctcagctcactacaacctctgcctcctgggttcaagcgattctcctgcctcagcctcctgagtagctaggattataggcatgtgccaccatgcccagctagttttttttatttttaggagagacagggtttcaccatgttggccaggctggtctcgagctcctgacctcaagtgatccacctgcctcggcctcccaaagtgctgggatcataggcatgagccactgtgccagcatgagcaggcaacatttaaggggctttccacattgtgctaggtctaaaatgtcctgcatccctgacaaacaaatatgtttactcttcctgaacacctctactagtttatacacagtccctgcttatctttcacatttaccgagaatattaatgttactacatactttcagttacctatgaaaatgaaataacaatattcattcattcaacaaatgattatctagcacttgctttgtgcaaggaattaaagaaacaacagtgagcaacacagaaatagtctccacaggagctagctatctgattcttgcagtagattcagccactaaaaatctatctacacagttaaatgttcaaatgcaatgtcaataagggcttcaaaggagaagtacatgatgcaacgttaatgtgcaacaggaattcctggaagtctgaaggaaacaggaaaggcctcccttagaagatgagagatgtttgacctgaattgtgaaggatgcatgagaatttaggaagaaaagaatactccagatcagtggttctcaaagtgtagtcctcagagcagggacatcagcatcaactacaaaaagatcattttgttttaagatcaccttatccgttctgtaaagagtgatttaggggtgagtatgaatggatgagcaagacattttagaaagttattgcatcagtcctggtgagagaggatggtggctttgactacaaaagtggcaaggcagataacataagtgaacatgacttcaagtcaacttgaagtgcatacaggacgaaaaatctataaagcttggttagtgtcagtagtgaagaagagtgaggcattacagcctgcagatttgcaaatgtatcatcatttgccacacccacatgcaccttaatctctgctatgtccatccagatcctcctgtatttgcagaccatgttcacgatgttggtacataaatacagctgaacgtaaacatcttctgaattaacctcaggcacagtttcccacaaaaagtgaataagcaaagaaatgagctgagaatccctactagctttcctgttaccttttgacagtgatacactttaccaaagtgatttctagaaacctgaatcttcagtgtatcccatgaaactgacttataaaatgactaagttccaggcaaggctactacagaaattcttcaactggccatttctaaactttgcttcgttaaaaaatattccccggacacaaacaatgtgttatgggctgaatgaaattaagcataggataaacctctgaagaaaggagcaaatatattgcctctgaatgtcgaactaagtggagattacactgcataaaagaaggacaggtggcactttctctcttgtttgcttttagtgatgctgtcaggaaactgctagagtccaggctgtgccctggaagaacagaagggctccctagctgctcttccaggccttgccaatgacgaggaatctgaagttccagggagtggtaagtttgggttgccctgggacatgcccaaaaaaatctagtggaaaaaatcaacatgtctccaggaaggttaacaaaatgatggaaaatcccagattgttagggggaagtaattgggggaggggatagaatgttgattacataacatccagcccttcaaacaatggagtaatcatcaaatgagtcactaagaaacacatggctgctccccatccatccccactctacacctccaagaacagctaagcggcaggtccagaaatgtcttcccttagagtagaaatcagttttactttagagaaaagggctctctagttaaccagagagtattgcttctgagagaagaaacaactgtagcagccccagctcccagcacatggctaaacacacaagtcaatcaacaaatgttgagtgaattaaatttttccaaatttgaagcaactttcctcccttcacccccatccaacacaaattcattaacttgaactgtgtgggttttgttgtgtgtgtttgttccctccattagatttatgacttgatgaaaaggaccttactgatggcggaaattggccaggacaacacatgtggaaaacacaggccaggccaaatggacaagcagtggttctgctgtagcgggaactgaagaatgagactgactaggaggcccccagaatcttctcaacatgaaagctgggacagtgggatgccagtgtgaggtgacagccaaggacgacagcagaaagcctgaaaaagaagttccttgagtctgcctcccataactacacaagccctggcagtgtggtctggacaggactgctgagctgacaattctccacgtaggtttctgcttcctgtcagggggcaggcacttctgggttctcacttgttctctcccaggaaagcagctagaattacttttgcctttccacctcaatgccatctccacaagcccagtccacgtgctgttggggccccatcagaggtgcctggctctgcccctctggctgtgagactcaagtgctagatctctttaaaaaaagggttcacatcccagctgggggaaaccatccctgtccacttaggacacttgcatttggacttgatcagctccagagaaggcacagcattgtctttggagccaaaggattcagatgtaaaagtcagaactttatcctataaagtgtggaattgtagtttaaaaagaaaaaaaaagtcaaactcccttctataactaagtgaacagttggcaaagattgtctttttcggttgtgtgagcattgctcttaagtgatgactaatcatgctcaaaaatgtatattaaatagaaaataaactcaccatataaaatactaattcaaaaattctcttcatgttgtttgcagattgtagcagttctgttcaatatactcatcaaaaacaatgacaaaatcattacacgggtgaaaaatctgacatgacttagcctaagcagatatcgctttactcttaaaatactttacttcatcacctattataatatttttacattaggtacaaaatatttctaattttagaatcagtgtctgaaagttaatcactacctccatagacattaactaattatattttatggaaaaatactgaaatctcctttgtgctaataattacaatatcttaaattcaaataacgtatttgtttcaaaatgctgagaatccggcctggagaaacactacgccaacacagtggagattctaaacacaacgcactggaaaatgaggacataaatatattgcaattatattagatttcctgcccactgattattccttgggaccccaaatttcagttaatatttataggaattcccctagacctctgaaaggacagttgtgcagaagctggtgattaaataaccattgcaggagattgcacagtatttagacagaagtgagcaggtagctttctctgaatctacagaagaataagctagtggcattttgaatgcagggaaacatctgctcatttttcattgtggcctaaccctgaaccacctcatagatgtttcaagtgaaatgtaaaacaagggtttccattcacttacatgtaactcaaagttaagggctgttcagtttccaagaaccttccagggtgtttcatgtgtcttttcataccactcttttcagttctttgaaaccgaatggctcttaccaacaatggtacacagaatctaaacactaggtggcttttgtttggcaagaagttcaagacatctggccttactgacctcacgagtttatgctctcactattctcaatcaatgatcatgtgaagactggagcgtctgggatcctagggttaggagatgagggatacagccaaggacaagaaatccaaggtgcatgtcccagttttgcatgaccattgaactgggcccaaccccatcagattatgataccagtcatgtgtgttgggtatggtcacactcaatagcagcatgaaagaaatactaagagtgagtaatatgccttatacctgagaaatgctttacagtttgccaagactcttcacatacactattccaaaatatcctctaaacataaaactggaggggcctggaaaggtatcacaaggtccccatttcacagatgaggaaatcaaggccctgggagatcaagagcttgacctaaagtcacaaggccaagagggaccagctggggctagaagccagtcttctaactcttaaagttcagggtctttctctctattccactgcaaacagaaatggatcagatatccaggaaaactaacatttttcagagctgagaaaaaaaaaatgggacttttcctttcttattttgaaagattttaggagtgattaaaaacttaaaactattccaagaaacccagggtttcatacagctagccccgtaagaacataattaagagccatttacagaatcaactataatcttttcttttcctggcactcaggcaactgaggcttccttccatatgaagcaaatgagttaagtgaaaacctggcttccttctctgtccaaccctgactcaacctaatgggtaactttgcatataacagaagtttaatttgttacataaaggcttactgaaatatattttttaaagtaaaagtaaaccaagaataaaccttctggtccacatggagaggataaaagaacagttctccaaactgaaagataggattctaaagacaaagaaaaaagagagagaggggcgtgcattgttgataacttgttgatcaaaatccataggttctgatttcacatacgccattagtgtagacacactggataagtcacttactcaattcactttgaaaagaggtctgttcataggtggtgtctatatccctcatagagttttacattttttatttggcaattttcaaacatacataaaagtagagagaaactctactcaaaatttatcaatactacccgtttttatttcatcttccacacacatgcacacccatacacacacgcagaagaattatacacctaatcccagaaaacaagtcatttcacccacaaatatttcattgtcacaaggatattttttagataaagggagatcatagagttaaagttcaataagaggcaaataaactcaaggaaaaagaaaaaaagccttcaagttactttctctcatgcttaaatctaggtctatatttcatgcattggcccacttgaaccacagaacttctttcaaagcaacactgtcatgatctggaaagtgccaatgttggatcacagagatgatttcaaatcaagatggtaagccagttccagggacttccatttcctacaagcagaaggctgcagtgatatttcctcttaatggtcaacatcctcatgaacttacaactgtaactaaagtgtacaaaacaaataaaaaggctcggagttctggccagcacagaagggcagtgtgaaaggtaatatcattgccaaactgccgacaacaagtcccagtttaggagataaggtgcctttaccccttcagaccaacacaaatagagaaatggctgcagccacactgacggctctgcttctgaagttgatgacccctggagggtggtcactggtctacaagaggattctcctgataaaaaagctaatgatctcagaagaatgtgcaaaggaatctcaaagaaagacagtctctattgccctctctcattcatataaaggcagggttgaagtagagtagaagggagtggtaagtgattcctgtgataggcactagaaaccgggcaggcaggacttccagcttagggaggtactataatccacaaagcttctggctaaggttaatgcaaagaagggagggaagtgtccctcctcagcccctcggctgtattttcataaacccaatgatgtgacaacacaatgggggacacgcaggactcttggctccagcaagagtgaagcaataaatgactcagtgcccatgctgaggccacccatcccaaccaaaccgtctattattgtcccaaacaacaggacactatgagacctggaagagactcatatgagttaggaaacatacaactgggtttctgaacttcttttaatacctaaccctttcgaagtcaccagccagtaaaaaccactgcaaagaagggagaagaagctgcagagaaaatccccaattcaccctccagtgacctgactgaccaaaaatgcaagccagtctcaagttacagtatctcggtttgctgccaatgcacacagtcactagggaaagcacgctctttgggtacaatgtgccaactcagaggagatgcctctccccagagggaagctgccctaagacaaaagagatggtctcctgcaaggcagctccaaattgcatggagaagctggtttcaggtcctgcagccaggcctgagaaagaagcctgtagagagggctcagcacactgaacatctgtaggaagtgacctcagacttctccctcttcccttcatccacctcctgccccatcccccaaaaggagttttaacacattattaccactgaagtcctgaggatttggtgactcaccaggctcacacatggttccaatgagcccttgaccattacatggtagggaagcaggaaaaacaaatgaaagcagttgtaattcggcagcgccggagttcagacctgccagacaaaagggattgcaggcatgttcccaaattcgttcaggcacctgacatgcacaagctatttttaatcactggatttatttctttcctacctcctccaccatcctccacctcagcaaatgtttcgaagtcagagcaaaacccaaatcaattccaggtgttcagggaaacccagagaggctcttccgttccaggatcccagccagaaagcagaactgcccccttggtcctgtagctaaattttctcgctcattccttagactagttcaaatctcccaccctaaacattgggcaaatggcctaaaataggaaatacatgaatgaatgtgtcctgctggaaaggcttttaaatatgtgtttttctctagcagcctggcaagtgaaggtacataaaccaggtctcaaagcccctcagatgaagctcgctttcattctctaggatgctctacccaccatgctgtgaggattaagtggactatgtgtgacaatgccaaagcttaagacatagtaggtgctcaacaaatcattggctacttgattatactgaaaagcatcttataaaatataaagacttaaaaaaaaagattttatttcccaatgcttacagaaacatcaagaaggaatctggcaatttctccaggtacaaataagcgactgagaaaataagaaaaacaaacgcaaaaatcagattctgagatataaatggaaattgacatcccctgaaactggcatttttttctaacagaatagactaatttcttacctattctgcatcctccaatctgctaacgggaaatactttttgcagcaataagcatctaaaatatgtttgccgtgacacttcagaactacatgaatccaatgcacctaagatgccttttggttgcaaaaacgtcctaagagttccactttagaatcaatatggcacaaagcaaaagtataattttatgctaagaactcttttctatgtgtttggaatctgccaaaacccaagctgcgttttaattgtcatttatgggcctctaaattaacgacactcaagcaatttaaaaggaagttttagctattgagattatgattcctgtgtgcaaggaccacctccatagggtacattaaagaatcatttaagcttcttaaatgatcatttcaagccatttacaaagtacttcacatgtttcaaagcatttcctgcatagataattacacctgactcccaccacatgacatactttatagttcctaaatgtcccagaacagtgtgacttctttatctgaaaaacacagagccatggtctctacattactcaggaggaaagaatgagttgggctctttcgtctccatggctttgcagagaaccacattgcatcctattggttcttcccacatcttacacttctgaatgaggaaaactcctgccctgccttcactaaaattctcatgacaggatcatacggcttttggtaccaacatgacataggataaccccatccaggaagacaatggagaatatctgacaactacatcttgctataatcccagcttccactaattctggtttacataatagcctttgaggcctcatcctctgagatcttgcagatgctgatgaattgggctaaccaatttattttaatttcacttaactcccacctataattatcattcctgctatttgactagaactgtatcttttagaaagcattttcttgaatattctcatatgatttttcaaaacaagcacttgtagttattatctttatcatgtaggtgaggaaactgaggctcacaaatgtttcttaagtgacttaactaagattatcaaaccagtaaagtgatataacaaggattcaatcccacatcttcagacacgcaagccacgtgttttctccctgcacctattcacagaattaaaagcaaatgaggcaaaaatgatggggcatgataacatttcttttttcattttctccaacattttcattctagaaaaagctctttctgtagcagggaagaacctcaatccccgagactctctaccgacagcaggctccattgcacgtcctacccagaactggcctggtcaaacctcggctcggggcccacttggcacttggtcggggggtaaaacaggcatcgggagagtggtgctgagaatcaccaagaaggccaggctgggcaaggtgtacgatgaggagttttctccatgggcaaatgaaaaatctgggcaaacaaatggagtagagcccgtttatttaggctggaagaggtaaagtttttctgcacttttgaactgttttctcaaggcctgcctctccctcccacgcaggaaacaaacacagagacaggcctcttccagtgagggcttcagttgttcaaagttagcccgggaagggcagaaggaagaaaggcttagagaaaggaaggaggaacgggggctaggaaggtggtgcagtggccatgggggtagccgccaagggagaaggctggagctgggatcagacagaggaggagagctggccaagaagggaggagagagggaagaaagcaggaagcagagaaagggaatattggaaaattgtaaaccagaacaaagaaacagaatgcagagtggcaatggcctgggaagaggcaacaaccgactcccaattaatgatgttcagaaagcaacattttttcatcaattttgaaaggaaattctctctcaactttcttatttatttatacattatataaatacatttttaaaccaaaaaaggaccgtttttccaatgggaaaaagtcttgtttgagatgaaagccagtcttcaaaaacttcttagaggaagctgaaaccccacatgtctcggtgctacagaaagaaaaacaaagtggacattcttcctgcgttctaaggcttttttatgcagatgtgtttttcttttaataaataaatctggactgagaaggaaaaagcatactcatacacattcacacagtgcaactgtctgttttcaacccagggaaaccacaatgaaaaataagaatacgcaagtccattttcccagtacatcagacaaggattctcaatattggcagccacaggcactgaagcaacacagtatgcgtgcacaccctgctccagcttccagatccacagaggagtacttgatgatgagtggtcatgaggggcagggcaggacctgaagaacgaccaccatacttccccagaagtcttctcacttaagacatttggttgccccatcctttttgagctacacaatttcacttataagccaaaatgattatttaaaaatgattagacacaacgagtttaaatctgccttcttatgaattctatcaataggcccttgctttgcttgttgagagatcagcagcacaaagcaaatttgtccttatctggcagcttttcccctgctttcttcctcctatcatcacttccgtccaggtttccaaactccgtggttccttcaaccattcatgttggcatggtttttggccactcccctcgctccacctagaagcattcctctaagcctatgttcctgaagagcatcacaagcattcataggtgaacatcgtgcttctcagaagttaaatgggaacaatgagatgatcatcttactccataagctttgactggtgcagactaagacaacactgatctaacagcctaactacaaaagccactcaaaggacattgccaggacctctccatagaaagtgatactgaaccagttctgtacctattgactgaattttattaacttcacaacagggcttcacatttatccatattaacttcactttgtttcgatccatgtttctaagaacttttttataccttgaatctgtgctcatcctattagccatcattctcagctttgcaccatctgcaatgcactaagtgtgctttctgtgtctttctctattctaagcccctaataaaaatgttgaaaaggcaaccagcaagtactgatccccataacataacatcagagaccatgcattactctgacactgacacattaatcaagacccgttgggtatagttgctcaaccagttacaaatcctcctgactttactatcattagatccacatatctttgtcttgaccacaaatatatcatggaaagactcagacaaaagcattactggaatcaaaatatgaggttacaatattcagttggtctcccacttgtggagccagttctcccctcgagtttctaagcatctggcaagtgaaaggtggctgatagtacaaatggttgagctggaattcagacccctgtacagtgaaataaagaaagacagagaaagggggtggggtggagagagagagagagagagaaagagagctgcagccacagcattgctttgcttctagaaacaatgggcagttagagaacaatggctacagacaaagtcttggtctatttatatctgccactgttagtcccagacaggaggaactggaagtctgccctgtatgcacagctccaactggacccaagttgggaggaagatgaggtcaccaagaaggctgcctgcttagaaatgggcttcttttttcttcgtatagttgcttcttagcctagaggttctcttaagcttgcttgccttctgctaaaatacagccactgctgagaagggagagatgagaaaagtaactgctgctctgcccagcccaaagcaattaaggcctctctgtacagaggttgcaggaaggtgggaacgccaaggaaaaaataaccaatcgatggaggtcaactctatggtttctgaaacaacagtcttattaggtctgttaattatacatgtttaggagcactataaaggagcttttccctgggaaagttccctcctcatttctttggagacaaataaagaggccaagagctgaaattcacagatatgtatgcattacatctcagggacaatctcttcttccctttatttcagcccctttttgatggtatctctattttctggaatttcatcttttgctctaacatggctttggagagatactcaattttaatccttcccaaactgtgttacttgtatccttaatcctcctacagccttactaaaaagagccaccagtagattagcctgtgacagacaccaaactgaacatgaggagagcctgggctggggaggaaggaacagggagggaggcacaggccgtgagcccctgcaggcatctcctcctgcatgccttcattgtgagtttccaccgacagcccttagcattaatgcgcaaccaacagtaagcaactgcaccctctggatccagtccaaccttatagccttaagaatcccacgtgcaaagctggaatctcccagaggcaagaaattcagggctcaacaaagagatcccctgagcagtaacttcagatttccactcatgcctcaagttcctgtcactaacttcccaccttgttcctggaaaaccaacatgtaaggagatatacaaatctaaataagattttttttctctttttcctttaaatagcttaaaatattttacagacaacatcccagataatgtcaacccattgggagggaactagtagcaaacagttaaatgttttataacttaaaattttaagcacagagcaggcacatgctggatactgctagggccaacgaaccctaggagccaagaaatggttaaaagggatgcatcacgttccttccccagccccacatgctcttcatcaacttcataagtgtgtcaagatgctcagggtccagaccatctggagggtgcgctcataaacttgaactaccaggacaacagataatgtgcacaagcccataacaagcaaacatactagtacatctttcatgctatgcaaatggtggagactgaaattcagatgaaacattggaccacctaaaatagaccaaactgtgaagatctaagtgagtgatctataggtcacctgacctggtacggtacttcattcaaacactgcttccttgactcctcccctatcccctgctcccaacagactaattattcccttctctaagggccctgctgaatcatcccagtgtaattcacaagagccacatgggaaccacatggtaggagtcaggagaaggcagagagacacacattcttaccctaaagcaaggctgacatcagagaagatgcagaaatccccaccctgagcatgttggtaagcacatgagatggccgtccctctgcctatcacaggctccaaaaaataccagcacgccagctaaacacaccaaaaaccgatggtgccgccccaacatggcacatctaatggaattcaggccccacacagtgcagtaaatctaaatatatgtccctaatgaggagtcagaaatcctgagacttcggggatttaggcaataattgtggggacccagctcaagtttcctgcactaaaaaggaggggcctagagagataagctttgaagggagcatgcttatgctccctaaaccattacgctcactgctaaacctatcatacgagcctactccaaggtttgtgtagacctacctaatctataattttggcctctatatctctttggctttggccttttttatggcctggagcaataactatcagcccgagtcctctcctggtgtgttcacacatttccctgcctctgtccctctatcccgccctcactatagctataggatgcataaagccttatccaggaccaaaaagcagaaaagaggaatttacagaatttgctataaaactttaacaactccttggagggatgttctctttccttgcaaccagacatagttataaaatggatgaaaagtggagagaaggaggagccaagctctgccactggtcaggggtcttacactattcctggaatacagaattagaagacgctttcgatgtcatctagttcaaaccttttcttttactggtgggtaaaatgaagctcaaggtgacatcaacttgccttaagtcactggttactaattctagaactctggctccctctcaggatttttttttcctctacatcattgctgtttacttacaacagtggactgggagggagaggctttctcctatatcttcactactatcaagtcctggttcatcattctggataaacactactcctccccaagttattaagaatcacagaggaatgagccatccaaagatctaataaatatgatgggattttacagattcatgatgctatccactcctatttcaggttataagtctggaataccaatggtcagactctaaggtggaaaagcttcctcctagcaaagatccttgttgcataccagggatattaagcaactttcaacagtcaactccgatagcatgataccatggtgtctgatggctctgaaatttgagggtgctattcctgtcaatccagaaagagtgaagactgcagttaacttcagtgatctatgaacctttatctaaaaagcactgaaaggcagagtgcctcatatcatttaaaggttttacaccactacccttctagtcctgctggtattccaaatagggtcactgagccatggtgatagggttgagggaatacaacaaaccccactgacaaagccagaacttaatatcaggggcactggccagtaagttgaatctgatctatctaattaatgaagctatctgttgacccccagaaaggccatggcctgaagtaacacaagcagctctagttgtgaaggcaaatgcagtcggaatgcagagacctaagggttccaggaaagatccacctcattgtgatctcttctagaccccacagatttttttcttctccttcccaatgggcttctctttaatggccccaaacacccaatcttcagcattctattgttcctgctgctgccccagagtctcgcccacacggacccagggcagacagcctcagacgcctctcccagtagcaagcccaagagggtggtaagtcgccaggcagacccaatctccagatcaatgggcgagaccaaccaatgggtggcgagcagacaaaaagtgatcaatgcaaaaggcggagggagcttaagccactctccatctgcctgggtaggtgagaaagggagagactgggatgtgcagccctcatccgctgctaataaatggctctgcctcatcaggaagccattaggaaattgcagccaccacagccccaagctccccggactgaactgtctgcatgcagctggtgaaagcgctcattatctctgtccagacgacactagctcactacacagtggagcctaaccaatgagccctcagaataaaccctgggcttgagtggtgaggaaggagggactgaaaaagtcccttgagattggggagatgcagcgctcccccaggtgtgtgctccaagctccagatcaggaatacgagcccttctcctcacatcccagctggacagcattctttttttcagaaagagctactgactgctcatgagcatggggcttcttttgggagtgatgaaaacattctggaattagacgttgatgatgatggcacaactctgtgaatgtactggaatgcactgacatgtacactttaagatggtaaattttatgttatatcaattatatctcaatttaaaaaaaagtaaatgttagagagagaaagagctactggcccactgctatgagcccaacaatgaataccttggtgatagatccctcaggcagagtttccctctagtgggagaagcaaacaccgcctaagtacagaagcaatagctatatgctcacaacagacgatgagtgctgggatcacggctgaagcggaaggttttgcaatgcagagtgagtgaactagcggggtccagaagcactaggggagggggtaggaaggagtgcacgtaagatgtcctgggtgtagggcgtgagggacagaaggcgggcaaggtgtccaggatggcgcccctggcagttggtggcattactgaaagggaagacgagaggatgagatctcccacagccacctccgccacctggaaatccttgtgagatggaagccccgcgatgctcactgggagaccgaccgtgggagaggctgggcacgggccatttccagaggcagacacctggtaactgcaatttctgggaccacttatgtgaggactaaagaggaagggccacaggttctaggagacgaacaaaatccctcaagttccctaccctaaagatgctcccagaaaaggctgccgagtgctcttttaaagtgatatgtgcatctttatacttacatacaaaagattctcaaggggaagaagtctccatcagacagggctctttcgccctccagtccctggtgggggagacagaggaaaagctgatagggcggtggggtgtgggggcggtgaaggctcactgcacaggaactgaggaaggtgcagtcacaacactgtgatgccagggatctttttgggaaattcttttccaaaagggatcatgaattttggcccctggaatgccccagagcacctctgattggttccctggccctgactcagatcgagccgggctccaccctccatgagtaaataaaggcagggacggagggagggagagggaaggagagggagcggagtgggcagacaggaaccagaaggccagcgctggttcagggaacacaccagatgagatttcagcgacgggtggtgtggcagaattcaagacataattctctgagccttacacaccactccagttgggattcagccctgccttggcagccggctcagtgctgctttataatatactgaattagtcactggattagcaagcacatttacacacagtggcgcacagctgtttaaagacgcaggatccccttttctaggtgccagattctggctataaatcaaccattgcaatcagcaaccagcaaaccccagaggtgcatggttcctgcagacatcttccttaggggaagcctgctagaactgcgatggccattttctggggacaggagggacatctgtggcaaagaaggaaaggtcggtgggctttttctgtcttgaatcttattatcttcagggggctgccaggtcttcactgacctggaccttcccggcagcagcctagctcaggaaatgacgcctgggagaacaggagttctaatcctgcctggctgtattatcaagtacagagtttttctcctaaaccttgaatggctgggtcacctcccagaaaagaaaagactccagggcaaagaggacagtacttcagcaattaaaataattttaaatcctgataacatcaattccaaaaaactgccttgttgaagtggcaagggcaatgtctaaaaataatgctttagagttggaatcataactcaagccctaactcacgttcggtaagaatgcgtgagaggcatttgaaaataattgaactggccacagggacggctctggcccacttggttatggaggtgtcaagtggaaaattttctgtaaccaggttaatagtaaccacagttttaacaaccgctgaagtaataacagcgacagcagcaatgaacttttgtacagaatttagtgacctacaagataatggtttattgagctcctgtggcaatgaaaaagtataaaagttttcacaggaattatctctaatcctaacagccctgaaagctctttattattacctcctttgtaaggatcagaaaagaaaggtttacagaagttaaataatttgtctaaggaaaaattagtaaagatcaagcctgaattcaaacccagggctgtcttacctcaaaactctgctctttcaagacatggtgctgcctccagtgaggaatatcattataaccaacataatgaaagggacgctgtgtgattcagggactcaattacttactatcaagcaccctaaatgtaaatccctctcctttgtcttagagggcttaggtacccaaagagaaatagggtttatctaaactctgtatcgtaagatcatggtaaaaagcctgtggcataaataaatccacctgacaaatataagaaccaagaaccaattactaaataaggcgaatttcatttaggctcctctagaacaggaatttagagaagattcgtaaagagatttgtgactagctcgtgtaggcagagcctagtgtgtattctgcaccagcttttggaaattcaagtattacttccttagaacttgtttgcccataaaaacactgaaaatattttcttacgaaccaaggcagtcgggggcaactgaagacttgcatcatctttgctcatcactctctgcctgcaccatgccactaggcagatattttgatcaaagccaggagaaaccagcggcaagtcacccagggcccaatctcattaaaaaaactaaatcgctgttcggttcacccagcaccccagatcctttggagactttgcagtcagcctgaaatttcaaagttctttcatcagatcatccattacagaagaggatgggtggaaggcatggaaaagccacaaagctccctgcaagagagaccttcagaaatccagaaatagattctttatttttaaaaatctccaattgaatcagaggttaacattatgtccaccgtggagatgctgattcattctgtgtgtgtgtttacttttctacaaatgtccctcttgcatcaagtagcttcaagccctaggcttgtgcctctgaacatcccctccctggagaactctcaagctggggtggagctctcacttcattcctcaattgtctaatctggagagtgggggccaaagcaccaattctgtacacaagtttagtaaatttggctagccacctttcatgtgtctactttggatttgaaaatgcaccatggaaatcaggtgaaaattttttttttttttttttttttttttactttcccactactaacacatcccaatggtagatatgtataagtgaaatgagtgcgttcttcctgcccctataatgacaagcctgacagagaacacatcacacagaagaatgtgccaagaatcaagacctcttagaagaatgttagaaagttttctctccaaatggattctgtctaagtaggaaggccttggcaactagaaaggtctaagatcaaatttatgacttgaaaactctatggctttgggcaaattatctgaacttaattctggactcaatttcttatctacaaaatgggaattaaggcatcaacctcaaagggttgtttaaagaatgtgattatgtatttctgtaaagcacattgcaaagtatctgacacatagtaggtactctctgtaaatattagcttcacttctctcactcctccaactgaactgcagttatgtaaagaaaagcaagcatccagcagttttgaagaatgtttggtttccattaggaggcaagggaggtgtaagattgaactcttgatcttatatgaaataaggatgcatttcctgtacacatacacatgactcacccttggggagctcatatgtatttagcatccccactccgtatcatatctcccactaatttaataacactccttgaatcaccaaagactccagagtactttctaaatgtgaactcattaactttcccactctctctcaaagaaaggcagctcactcactaggagcatccttcttggagaagaatacaaagataatgcagacatgtgtccatatctggtggcttaaggtaaagccagacttgggtatcctgattctcacatcaggcaacagaaggtaataagatgaccacctatgccaccctgcccagttaacagcagagaaaatattcaaaccgggcaaagctaagaccaaggaccccttaggcctgacccaaaactattggtacatggagggcaccaagccatagtgctgaaccccaattggaggaggagacacacttcgtgacctcactaggatttgctttacaagataagattttcctggcaagcattgaagttagtgcccagattcaaaacagcaaacttaaaactattatcttcatgcttgctataatcaggtgtaccgcccaacttcccatccctacctccccttccctagtaatccagaggtactcaaggtcactactggctacttaaggtttacatccactcccaaggaaacaccagcaaccaaaagaatacttcccagatggaaaacccgtcatttgaccttggaatgctctgcctcccataatgaccaaaataaggtccggccagaggggcttacgttttttggtaaggaacaacacattgttttagagagataatctgacataactctgctaagctctgagtgtctatgcatggtaccacagcaaacaccctatgtcccaaatggaaactagcagggtgaaaaaattgttcatctaagatgacattaatctctgtatgcctccttggtacagttcttttccacaacatgcagcttaagattcaacaattttttcattgtgttttgtgtttcctgaagcattcctccagctacctgaagctctcactgattaaaatagacctcctttactaaaaggggtaaactgaggcacagaagaacaaagcaatgtgccttatagttcagaataggtaaacaaaaattggacatctattattttcaaatctctttagattaaaagaaaaaaaaatgtatttctcaaagtccaaagtcaaccttctccaaagggaaactgcatgtctgtctagtaacctataggatcattcacacttttttttccttgagaaggaactaacttgccagcctaccaacaattttgccagtgccttggcatcaggcatatctgcacaacctttccagagcctatatcatagtgatctgttcaagctgctcaaagctcagtaatcatactaatctgtgcatagtgaccagtgctacctgctcaaagctcagtaatcagccagctatgtgggacttgttatagatgcataaaatatgtgggtgaaatctacctccaccaaaagagaaaagaatgccttgttgacactttgatctcaagctaacgtttattaataacatcattattatatttaagtgaatgtactagatactcatcgaatcaaagaaatgtttaaaatccatgtggctgaactcaaatgtcaggggatttggagaaactgactggagcttcatgttctaactctccgcttatttgccctggaaccttgggagggtaacttggcatcggtgcactgcactttccttatttgtaaaatattggtaactctaaggattaccatgagctcaaatgtggtgaagtcacatggcaaactgtaaaatgctaccagatatagccaagtattaagatgaactagcaaacaatatgcacaaacggaccttagtatttcccccaaattccacaaacacccaaatatttctgagaattctgaaaacaacagacatggaattttcaagttagctacagctgggtttgaatctgaactcctccactcagcagctttgcaaccttgggcaagtcgtttaatctcagtttcttcatctatgaaatggcaataataatgcttcactattggggcgaaataatgaggatactggcacaaagtttgcgcccaataactatcagaaaataaacagaacatgaggaaaaaagaaaagatggatggagatgagaagtgcttacacaagcaccagtagataaactctacactgtcatcaatgatcgttttccttgtttttcccccaaaaactggcatgctgaacttaggtccctgctttggaaagagaagggtaactgcgacagacctttctcaaaatgcagaaataacatcaatcagatgagacttcagataacccccatgtgcgggcaccgctcttccaccgccgccacagcccagtacatttgtagcttccggggtggctggggaagccaaggcaggtggtttcttgtccggctccaactctgctaagcagcgtgtgtccagtgaaggatcagccggtggccacctagacaccattctgtgggcacccaaagcacgcaggcctggcctttccctctgtgcaaacagcaggccagggccctgacttactgggcctgtcaggaagaggcactgccgtggctaacagcagattgcattctcaaggcaggagggactgtttctgaccagagcagcctatcaagaagaggcagattggatgaaataagctcatcactcagcccacagactcggcctgcggaagcagctggactagctgcttcacctactgaatgcttgacttacatctccctcctccaggtgagaacctgcactggagctgccttccgctgcaactgcagcaacggctcatggaaaagggaagctgaaaggaagaccatgaggaaggtatgactcttggttcagtgctacccaagacaacatgcctccatttccccaatggtgagctaggctggcaacaatttctaacatctctgtttctctgtggaagtagccctttaccaaagcacccaaaattcctcaatgattaagttgttattaacagaatttggggattaggatgcaaatccccatgttgcctacctcttgaatggcagtctacactctctccaagccttggctgttttaaatgttacctaaagtcataagatgtcactgttaggagaaatctgacaggtcgtcattccaatgaatttatttgactgatgaagaaaatgaggtgcataaaaatgcaatgacttgcctaaggtcacacagacagatactgatgcagagctgtggctggagaccaacactcccgactctccagcccacattctcctcacagagtggatgctgtttatttcatacacaatatttattcctactggtaaggaacaaatacggtaaggtcttccttatcatctgtgattcttcattgcattctgtgcatttatttcgtgtcttaatgatgtgagacaactgatgcataaggtatggaattaacttaaatttttggcaaaagatatcaaataggagaaatgtgtaggtactagaagtacaaaagtcggttacatggaaactctttcactgaaaatttcctgtgataaatttcttaaagggtatttcaaaatcagacttgggcaggggcagtggctcatgcccgtaatcccaacattttaggaggccaaggtggaaagattgtttgaagccaagagtttaagaccagcctgggcaacatagcgagacctcatttctacaaaaaagaaaaagaaaatcagactcaacaacacatttttattctgaacatgaatgatactaatgcatcacacaactctaaacgcatcacacaactctaattgcacacaaaaaaagtaattaattgagaacaggtataacacctggcacatagtgggagaccctagatacttcaaaaaacccgtatctacaaacactcaccaggcttagcagattcctgtgcctgaccgaggttattttccatttgtaccttgaaaatatgtacctgattgattttgtcatcttctctgaggtttaacgcttattctgataaactgatacagaggttttaacaacagtatgagtaggaggaaaagtaaccaaaaaaaaaaagttacctatctcataagcttactcaataactctgctctacccttaaatattcctactttcaaaggcaaaattcatcctgaggttcaaaacgctctttgggtcctggcctcctacttccttccttcatccctttctacaagtaagttttttttccttcatgtttatctaagcatctctttcattccaaacttgcagcattcttcccacgctgctctctatatggaaaataatcctttccctgttcttacacctccttcaaatgcttcagaagtgcccctgtttcccatgaagctgacctatgaaactaacttaacactgttgcaagagagagcttcacagacacagaaaataccaacagtcattgatccacacatattttcataaatgtaaacactggtcctcctgcattttttgccatggaagcacctggaacccagggaagacttcatctgagttgtcctgaccacccatctacccatgagggatttaaagtattcagaaatgaccacaggcaaggagtagaaacaacagacccaaaactgcccatggggccacctgagcctggaattcctaaccaggtgtaatgcttggcccagatgaaagcttttccaagaatctatgtaatatcacttaaattcgttcatctttagttttacaatttcctttcattcattctttcatactttcttactcttcctgtcctcattcttattcttgtctttttttaattcaaaaagaattttgcaattgaatccaccattcctttcctccccttctaaagaattgagggcttgttttttatttttgcttttgtttttgcccactttaatggtacaaaaagaaaacacaacattttttttgccccttttcagcccaaagtaaaatttcttatcttcgataaacatttaaacaaaacaaaacaaaaattgcaattgtcttcacttgtgtaatgaagacacgtccctctacttcaaagttcattttatctctctgtcacacacacacacacacacacgcgcgcgtgcacactacatgcagagtttacagtttctccacagaaccttgcaaagcaaaaataaatggcttatcacagctacccaaagctaccaagaggtttcaaatgcttgaagtgaacttgtctgaggttgatttgggtttctcagacactgagaaacaaatttaaaatataatccatgtttgggggaaaaccatactaaacttaaagggcttcaaactcttaatcgtgccttattagcttacttagatggtctaaaccctgaaattggcaattgagagaagatattctagaaagtacgattgaccaaatttagtgtctaactcgggtggccctcatctgtggggagagccccagttaatgtctgtcattctgatgcaattattaatagtgcccctttacactctcaaaggtatcccagtttgggtggtaaattatacgattttctatctctacaccattatgatctgaagtccaacagccttaaaatttctaatattactttgggtctaaaagcactatctgggtcaatattccacaactcttagagacagtactaaatgctacaagaaagaacaattgagaaaagtggaaggggcagtaataagccacatttgaagtgtcaagtgacaggcttgcacccaagcagtagacactggaaagcacctgggaaatatgacagcgttggccaagtgatcaataaaatatttacggcttgaatagcaatattttgagcgtgtctgttaagcatggctctctgccaatgaaaccagacctaccacaatccaccctgcagacctatgtctttctgtatctgcatggagattatacattatacaatcagaaggaaaagggggtgcagataggcgaaggcttcagaaaagcagccaagtagaaatagcctgtttatgcaatttggaaaacatccactgaagttttgaaaaagatatcatcaacccgacagaaaaaataaagcagaaagtagctagagacacatgacaagtaaaaatgatagatttgggaatagccttgacattcctaaccctgagttaagaacagcttaacagctgtgagcgaagggtagacctagaatactgcaaacatagaggcaaatgctatcagaggttccttgtgagcaggaaaatggagccaaggttttcattaaggagcagctaaataaaaacacggagatgatgttgttcatatacaaattcctctctgcggtgacagtgtgggcccaagcatactaactcttcgggaaaatgctccccataatgcagtaataaagaaaccaatgccttaaccttaaacaagtggcaggggagtgtgcctgtgtgtgagccatgggctgggacagctggcaggtctgcaggtagacacctggggctgtcttgtgccaggacaactccagaccatgtgccctgacacatggaatggacttttttaaaaaaaactaaattttaggggaaaaaacgaaatttatatgaggcataggcagcaaatgcaactcaactatctatggcctctctgcaagcaggataattaaattttaactgccttaagaaaatgaactagtttgccaagctatgtctcatcatcctgattatgagagattcaatgcacagcaacatcagtgatgaaggggaagaaatgggcagaatctggaggctcagcgaaggactgaccttggaggtgaacataatcaccttcctacctgtgagagagccaaggccatatggaagacgttgcaaaaacaagaatcctggttctctgcctttcattctgaggtaagcattgctggaactttcaaacatctttctaaagcaacacatctggactgccaggcctggggacaacccacaggatggaccctttccccaagccgtatgaagcactgagctaacaatgaggccacctgattcagctcagggggctcttgcagagatagcagggagccactgtacctcctgaacccccaaagcaccgaccagcattgccttctcacctgcctgtgttctaatttccagagtttttgagaataactcaaaattttaggtataaaatgcctacaacatctcatcagtttctaaatttctagagtgtggccttaggccaagtatgcatctctcagaaactcattttcctcatctgaaaaatggagaaaataatacttccaccacacctcagagtaagtgtgaagcataaaagtgctcttttatctggctgtgcccagcacacaatgcaggctcgatgtgtgcttcagaaatatcccaacaacttttgaatgacaagaacctaccaccttcaatgcaagctcatggaattccaccacagccatggattattcattacacaaaccagagagacatctgtaattacactgtcactgtaaccattgcagagttatctgctgtattctgaaacagggagactctcctgaaaaatcctgacctacactaaccagctctcagtttgcagagatttgatggagcccagagagacctgggctccgggaggttgaccacgagctggtttgtctcctggagggaggcgatgctcctacagggtggtctggcctctttaagagaaaaaaaaagttacacagacaaaaaaacagcaacacaaaccaaccaaaaatgccaggaatgcaagctctgccaaccaaataaataaataaaataggagatgctttataataactggacatgatgcatttctcagccctgcataattgaaaacttgacttttccatcaaccctgcaaatgttccccttgcctctagacttggtagccttcctgctctgaggtaacaatgacaatctccatcacccaaagtaactggcaaccccctccctgtgcctccaacagtgagagctggacttcaagacactctctgaaagttacctctcactatttgctccctggagaacagaatgaagtttcacgggcatgggatctcagctaagcaggtgaaaaggtcctccttaactttactcttctttccctctaaaataatagattatcaggaggtacataacacagccaccttatcttctaacaaacattcaagggcctctgaaaattctacactgatcaggatcattttttgttgacttgctctgtagttaactgctaaatagtatttattatggatcaggcactgttttaagattttgcacatattcatagatttaatcctgatattcatcctatgaagtagaatgattgtactcattttatagatgcagaagctggagcacagagagattaagtcatttgtccaaagtcacacagctgctaagtggccgagctgagattcaaatccagacaggctggctccagagtctctgctctgaaccatagagctctttagtctctaatggagtatggtcggcggggatctgggagcacagtgagcaagtgatctaatagactgggcagctctgcccttctttcttgtctacactgatgaagaaacaaagactgaccaagctgagcaaggacaaagcttcttcctatctctaagtataacgcatgttcccgatggatgtacaccctctgctgagggcgggtggggtgagaggctgatccttttattcttatagaacagcaagtatccaggattagagctcctgctcttatctggacattaagctcacctcaccaagaaggtagagcagagtgttgaaggaaaggaaaaattaagtggcttgggaatgtgttggctttggcacctggccccttcacagcaggctccaccaggagagaaccaggagtgaacccaatggctatatttgtttttaagctatttaagatccttgcaatcacactgttgcaatcaaatagcatatcccaccttactcttacacttgcaaggaaaagtcaattctactgttatttcagagtatatgttaatttagcacttaacgctgtcaaactcctgtgaagtctcaaaatagaataaaagtgcataaaggttcttggtcaggtcctagccaggaaaacaaataatccaggtcttgcggctcctgtttggacaccccactttcttactgcctctctttggcactcatgaatttgggagggggtggggagaaaattctggtttaatcatttaagccagataagatcccacactagctgtctccacacataagaaactaagcaacccaaagaaatcattctgacaaatatttaagtcacagctgtggataaaaagctacgctgtgagaagttaaactttaaacacatgtcctatatggtctgatgggcaaggcaaatccgcacttagccaatgtcttgtccttccactaacaaaagcagacagccctggccagaaacaccgtttctcccatccttgctttgcacctgcaagttaagtctcagctgaggtttctttgctgagcttttggaaggtatcttgcaacattactcaaagcaatatacattgcgaagttagaaacaggaattgattgtacttcagccactggctcactacatatttttatgtcaattatttacctttcctgtgactctattttcctctctgaggtatgggcataatgttcgcatataagcaactaaaggtccagaaaaaaaaaagttgattatagtctatatattttttcaagtttttgtctttattttttccaagataataaataatggtgctagaaatcaaacctctttacaatgaatggcagaagactgcccaatttctttggccagttgaaattttgttgtatcgaagttcacatacaaaagatgaccaatggcttggaaatcttttttgaaaaagaaagccattgcaaatatgcttattataatggacgctgactgtagcgttaggccttattgttcccattttacagaatagaaagctaaagaaagttacttgcccagagcttatttttaatcagtaactgaaatgacggcaccatatacattgtctctaatatttaatattaaattaccaaaaaaattgcctcagctgttcactgtgatctgaaacatgtgttgccagggctctttttcattcccaggatgaaagatcccttgtaggtatgtggactgacatatcgacacgatatttcccagatgaccaaatctgtctcttcccccataaacacccataacaacacatataaacaagctgttcttaaggaaaggacctattagttgagtttatatctttgatgtgaactatcttttcacttctatatatggtttcaatcaactgacaaacagaactcattctagcttcctcgaacccccaaacacaaccatcatagaaacagcatttctgaattgtaggcctaagtgccttaaatgtctccatggttccagctgcgctctcagcattgctcccaccaccatcatccttgcgaggagacaaaatctcagccttctgtgcacagcagccctggagctgaatgtcaggggacccagagggaggggacgtgacctacatgtctttattaatatttctgaaggacctcagaatgacaaaacatcagtatggttgtgctgaaagtttaagcagcgtaagaaagggttaaagtaagcaataaattatggcagaggcaaagaagtgttaaccacagggggcagcaactaaacttattgataatcagatacaacagaggagcctgttcttgaaattaattattttccagggtgcactgccttctccctagatctttctatatactttcacctccaaaatcactcatctctaaggatagctggcagtgccttatcctaaaagaaagcatctttccctctcaaactacatttgtttcagaaattctgtaaggccagactctcttaagttgcttagcaccaatatttgtgtcaaagacaaaaaaaaaaaaaattacttcctatccttctcttcttcaaatgcatataaatgaaagagttggacaacaccatgtaccaaagacacaaagtcacatttgggtgtttgatgctttccttccaacggacctttggtaccagaagaaaaatttatggcagattagaaacatgggtaaagtaagtaacctacatgaatagggtcggacgtttctcaaagttaagaggataatttcaattctcctccgatctccttaccctcaacccagaaaagaggggcaaggcatgtgacagggacgcttggggaggcaagaccttatttgaaaatctgcctgaaggccaacccgttagactgcccggggccctccacccagcctcagttctatgggggacgtggagtcaggcgatgatgtcctctgaggcagcgtccatctccccttaacattaaggaataaggccagagggttctcgctcatttgggaaaataaaaaaagcaggaatggggcgctggaaattctataagcttttccccaccactcacaaaaacacagctgtgaaaataaataccaccccccaaaccaagggtctagggccaccaacagtcctcctcctcctcctcctcctccttctcctcctcgtcctccagatccagctgccaacagcatcccccgctcctgaagaaatgcaccgcccagaagggaacggcgaaagggggaagaagtccaggggacccccggcctctggccgagagcttgggtgggggcctcggccgtcgccactcacccggggaggggaaaagctccagatcgactttttccgtcttgatgatggtgagagtcggcttgagatcgacggccgccttcatggtgccaggagtgggggacgtacgggatggtagcaagtttgcagttactgttgtttttctttttaatgaggattagtaacagggggaaggggacgggggaaatccgactttcttcccaaaaatctcaaattcccgctgcctttctttcccccgcgcccggacggtgcgcgcccggcactccaggggaagttggcactttgcggcgaagtgagcgcgctcgggtcccagcctcgcccgcgccgcgcccgctcctcctgcccggccctcgcccgctccctcctctccgccggcggctgcctcgttcgctctcgatctcccggccgctctccctccctctcgccctcccgcgctctcccctcctctttagggcgtttctcgcggcgccgcgtctcggccgctgggtccgcgcgccctgggccgggcgatgtccgcttgggggagcgaggggcggggcgtcggggcagggcggggagccgggggcggggccgagcaccgcggccaatctccgcccgcggcccaaagcgaaaggaagggctggcgagcgcggggccgggccgcgaccgcggaggagcagtgcgtggagccccgggcctcggagcccaggcaggggcgggaagggccgggagcgggtgtgcaggctgggtgcacaggccgcctccaccgtttcgggaaagtccgtctgattctccacgcattcttgagggcttggtcacccgctctcgccccctcccagtagcagcatagttttccaagtgcgtgtacatcattcattcacaaagactgacacacaggacgtgaggcatgtggatgaaggcgagcgtgcaggcaggcgcaggggattcgtgagcccgtgtcctcaaagggctttaggagtattggactccagccggatcttgagtcagggcgtgtgtttctgaaggaggcttcagtttttcagagcccacccatgtaatgctcctgcgttggcaggggagtccagaacgggaccccaaactagaacccagccatgagcttccgtaagcttccaatttacctccagcagtggttgggttgaaggggaagttatgatttatttctaattattctgttcctctaattatgtcaccattggccaaagctttgtctttcctttcacagactctcctcttttagataaaactaacaaccctcccacgaccgccaccaaaaaagtgatgcagaggctctgtggttttgaatttctggagtacatcattggcagccatgacagaatcacaatgcacagtttctgttccatttgggaacccccaacactagagataaaacaaaatgaacccgaataattcatggtttgccactaatacattggttgtaatagagatagtttgtcctaattaacaaatcaaccagtacatgtatatatctaaatacatagctagaaccaggcactgagctccatctttgattaacagaaagattaaacataaatcttcctgagcaatctcagagaaagctatttttaatgtttcctgatttctaagcacatttgaactcccagcatttgactgtaactgtaacctctgcctctggtaagttttgacacacaggcttaccttcatctaatcccagttttgtgcccttgaagccttagtaatttgcagatttcccacagcaaatcggggaggaagccaggaacagaaaaatctgtggctcctggtctaaactccagattaaatccctccttagtgaccagaggaaaatatttgtatgtgatagtcctaatttttgaaagaacaaagactgttgcaatccagctgtgtttccacaaggtatgagaaaacaatgctggcctccagatgacaagaacagacccttctggtcctgggaaaagcctagagaaacagctgatgaatgaattgtacatttacacgtccaaatgaaccacaaaaaaaaaaaggttcttgaatcaattctgccttactcactatgaattcatcaggagaagaagtgaacaaatctagagttgctttggggaattttgttttgttgatgttgtattgagaaaatgttggcattttttaatccaagtgtgagtacttctctattttcaaatgcagattcctcagagcaactcctttctctcttccccagtttgctcctcaactttcttccccagactagcctaaacactgctgctaacatccacccaaattagatactaaaaaagcccaccatgattaaactgtaaacactttccactctagcaatgaggaaaattattctttctaattcttccatagtgacaactcagatagtcaatcatccgtttcctaatccagtcctgaagcacagaaacaaaatgagtgaatgtccaaatcaaggaatagggttgcgtaaagcagcagtttggagagatagccaggcgccaccacaggctgccaggaaagttacctccagatgatattaattatgaatatttatgccatcagaagttatgcatcgaaccctggatttggatgaagagcactaataaggtcatgttaaaatattttttacatatttaagatataataatctgatcaggtctgccagggtcatgtttcattaatctaatcaatgttgataaatgaaatttttattcattctctttaggacacaagtagatttttctaaatgttcatatggactttaaatgatatttctatgttatcatacgctaaaacattgatgcctagcctagtgcctaagacattacagagctcaataaatatgtgttgaatgatgaactatcaactttttggtcactatgggcttcctaattcaatgattaagtgagtttgatatgctctggcttgtgaagatgaactaaaaagtgtcagaggctgtgcccttttcccttcatagtagagcagaacctctatccccagcactcacgtccactcggttacatgtatgcctcagtgtccccaccagccaaacaacagcagccaagcgttgcctttcatccacttgggcaagatacttcaataccatatctggtttttaaggcactcaggaaaaaaaaaaatcaatcaaataaatacttctgtgcttgtgcttgtactgcagcagtctgttcctcctgcatttgggaaaaaacagaattgtatttttaagcattccttagacttcggctaattatatcctaccaagtgctgaattgccttacactaggaacgtgaagtcaataagggccaagaaaagtccgcaggagttggggaacagaagagtggagctagacaataatattaagaaaatagtcaccttcatacaggaattcctcaagcacatggagtatgtaaaaagcatactttcttttttatttatactcctccctcaactccaccccaacttcaataaaaaagaaatataaatatacacttaatgttgaacaatcatggaagacagactttccctctccagaagtgtcctagcatgttatctactcctgagtcttgaacttcaacaaaacaaagaatctctgagttttgagctaaaatatgctttactgaaggtaggtacaaaaacattcagaccactaacggctgatccagaaccagtttatgactcacagatgttgatttactggtataaatgtaagatttagaaaaaaaaaaaaaaaaaaaaaagccctcaattaacaacaacctgtctgagctgcatttgtggtctcatttttctctgagaaaaggcaacagtctctgtcatacacagaaacaagctttgaaagcttacttctaaggcaagtggtttctatgtgagaagtttagtcattaaaagtcacactagggaagaaaaatgcctggcacttcaatatctacattatcaagcagcaataaaatggaaaattagagataggaaggaaaattaaaataactctcttaattaaacttggatgccaaaaagccttagggtcagttaagggacccaagccaggggactcagatggtactgttgctgactgcaggctggctctgtgacctcaccaaagccacttaacctttttgtgtcacaacctcatctctgtttcagggaataaaatcagccctagctctccctagaatggaacacagactcattggctattgtttagaaggcacaataaacaatgagggtaggaggagctgcagtcaggagggaagaagggagggtggggtggggttgggggagaggggaggacttgggagcctgtttgccctggaaagctcaatataagaaaacaaagaggatagtagtgtgggctttggaataagactcaggttcaaattcttactctaccaactagccagctgaattgccacaggtaagtcatttaaacaatcccgaacctcagttcctccatgtttcaactagggataatagcagcacacaccttttaaggctatttgaatgattaaatgagataatgtatgcaaagaatttagcacagtgtctaggtgagaattagtatttgattattgttattaagatctagtatacggtagaatatgtgggaaatcacattaaatgtctgtctacagccatctctttgcagaatagcttggatgctcaattttcctgaacgatctccagcgagagatagaacaactatcaccacatttcatttaaaaatctcttcaagacccttcctcagttcttaaactggcaacctgcccagcatcagcctcacttgagaaattcgagaactacctgattggagaagagaactagatttatatttgttttgagtcacagaaaagtgacagtttaaattctgaaagaagatcacatttgtagtgcctctttggagacaaaaccttaggtcttggatttgtcacatgttagagctcaatgggagtttatcagtgctctccaagtccagcactcctatttaccagaggtgaaaaatgagtgtgagtgaggaaattattatttccagggccacacaatctaaaaaagtcagtgtcagtactagaaccagatgccctgatagcagttctctccctggcatctccttgcatttactttgcatttcactttggcaggagaagtaccagacacccttgagacacaagacaggatacaatggacatgggagtagatagatgagcagactcaatttctagaaatccaacttctctacactggatgtattgtctttgggcaaatacattgcaggataaccacactatggttccctgtgggagacagcttggcatgggctgtcaggagagaaagggcctgggttggctctattgctgtctgcagtttctttagactataattatgaaccattcaactgcatctgcagccccaacaatgtggggtggattggcctaatccacagaccaagcgacattttaaaatccagcagtttagacacgtattcctcttgcagcaaatcaaacatggctcagacaggaagaggtaaggagctgcccaaggttagagggttctgaggtctcatccacactcagtgttgtgtgcttccctgaagcaggctgagcatgttgcctggaattgctgcaaatgcagaatgcaggctactctgtgagcctttggggatcatgtaattgggattccaatttaaattgtcctgaattggactcttgaggaggtagagggataatggcaatagcacagatggcaagagaaccaacatcctttaataatatgagagaagaggacagccagtctcctagaagctctgcatcccagggctacaggatttcacccactgtccaaggctgcaggtggtttcatcctggtggaaggctaaggccttcctctgatcttactctgcttttctcttgggttacaaagacaacatcaaacttcaaaacagatgttctctgcagttgtggtttgaatcttacattaagacaatttcactgtggaatcttttcccctctccccactactttcatttaaaatgccaaatcaattgccccaaaagactaacatttaccaccccagagatcaagaagcagagataagtggagcacaaaaaggagaaatagccctgaaaggaaaagggacggtggtacaggaggaagtagtggaagggaagtcctctgagaacaatggaagtgtaagtcgaggacagagaaggggaggagatgaggaggtagagtcacagtgattttatgttcttgtcgttctgggacttcagtccccaagatttcaaaatgcagttaagacctagtaaagtatcccatactttaattaattgtcttgcatggccaacagtcatggaactacagaaaacagatcaatgggaggtcctcatgctggaagagatgcaaaggatccaggatagaatggaggtgaaaggatctcaggaggtcacagaagacacaagggaaggtcaagctgacaatctaggcagaatatagagtgtgtttctcagtcttttcctcacatggacatttgcagtacacaaagaatttccctcacagaagctgtcaccccacccctgcaagttgccacttttctgctcagctcaagagcacactcctagtacatatttgaatatgcgtgtcagtctcctacactctttaaaggcagcaactgaggttcagtcattattacactccatggtgtttagctcaaggtagtaagagccccataaattatgttcattatttaattaatgaacagttaacttcctaacatccccgtaacatttttacagaaaaatgaagctcagataccagttttgttttgcctagttcggtctgaagtgagactcaaatttgcccaaagtttaagattaaagatccaaccaactgactcatttctaactaaaaaggtcttcgtaaagttttattctgttcctcccattcctcccatccccttaaaggagaatgttgctaagatcacaatattcattttactttttatctaattttttattctgagacttcatgtaaaaaatgacatttggctcaccacgaagtaaatcagttgtttgattgtcagcctggacgttttatacatcacgctattcatattctcagatggctgctcagaagcagtcttcaggaatttccgaacttcgagttgaatcttttatttcactggcttccacaaaggtaagatgtacaactgctatatacattatttgtaagataagggaaatacatgaaatgaactcaatttcctccatctttatgagaaagaatagactgttacatgctttatggtgagccagggtgcttactacaaatccctttcaccttctcaagtttaatctgtcaggactccagaagcactgtattttgaaatatatcttctggctatacaggtgattctatattgaggaagggtatgggttggaagtagaaatggggggacatggggatgggctgagagtgaagatgggaatgaaaaggacagggaggatcaaatggagctgctacaatctagcaggtggcacagaaatatagaaagcagccctaaccacttttgtcgaagtagagtattgctctctgcactttgttgtttgtatctactaatgggtaatcaagatgttggaacagaaaaggcagctgatcttaaagcctaaaaaccaaggaaatattggatttggtgagggctcatgatttctcctgagttctgagggggaatcatgaacacacattattttacatcacttcttccagaaccagttccgtataagagccccaagaaaacattgatgtgtcacactaagaacagcctgcttagccagtaaatataacattctttgagtatgtcactgcagtcatccacaaacattttactcaagaatctatgcctatcttaccttaggcatccttcaatgagcagcattatagtgtcataatgaattaatatgaatcctagcttcaccaatgctaactctaccaacagaggaagtaaaatgcatagcactttttaagttcccatgctgctttaaacctcttttctggtatgtactctcctgaaaagggtgcacagaatctgagtttcataaatatgcaggaacataaattcattaaaacaactttagggtgtccagtgtaattattcatatttagaatttactgagcatcaagcatgccaatgatgtaaagttgacagatttgaataagaagctcaaaaagggacatgtcaatttctccagcgttacagctcacatttgattctcagctcttaaggaccaaaaagaaatgaagtcttctttaatttgcaagcagccagctgtgctcactccacatcttgcatcagccctgtgaaggagtcagaatgtagtggatggtcctgcccatgactcatgaggtggaacagacccagctcacatctcatctatctggattggctcccatacaataaaaatctttcttccgttgagttggtgaaaagaagagaagcaaaatgggcatgtgtgacgtgtaagagggcgccatttaatcagacaggcctgtgaaacactttcaagagtccagggctggcagtgagaggtaatgacaggtaacgtgcagaatgaagaaagcagaaagcatatagaagttgcttcttaatggaaacgtgtttcatcagaatgatcagaaacatgtgttctccccagattgggaaaccatcttgaaagacttcatcacaaaaaggccttgggtgggaagtaccacaagggacccatccaggaggggtgggaggaggtgcagctgggtgggaagctggcaatggactgtgagaggaaaaaacaaagggcagtcagcgctctcatggcagattcccaagagagaaccctttccaggaatttaaaattctgaataattgttgagaatttctaaaaatcaagaagattataaacttttctttcaggggattccacagcattgagagagaccagatggctggcaacaaaattccagatccaggaaaggtccagcatctacatatccatccacttttagtgagctaatgctttctcctacagagtgtatttgtctaattgaattgaattgaattgaactgaggtgtggaggtaaaaaggctattgcaaataagtgttcctgtttccaaatagtccatacaaaaacctgcagtttcttgccaagcagaaactaccaggctttggtttcctcactatagaataaatttaaactctaaaataaccagggaggcaacatagtagagtgggttaagagcacaagcttggcagtaaatagacgagagtttgaattttagcttggctgctctccagatgtcagtctttgacctcagaaagcctcagtttcttcatctacagaatggagatgcggaaagtgcctagttcacagagttgaactgagatgagatgagatgaatgggtgccaagtgctttgcactgtgcatgatgcagaatgaagactcagtaacccttcactgctattattgattttaaaaatcagaattgtgacttcggatttagtgagcataaaattttcatgaatgttaatccaaactgtagtatatagtattcttatgaagaaatgaggacacagtgtcctatcttcatgtgcgctgttaaaatcatgacatagtgacaaagataagttttggtctaggtatgcaaatcatgcaaatccttgacaccatccctcttggatgaaaggggattaattcccactatatagatgtgagatacaattatgaaagttctaatcatatactcacagctacattacaaattagcagcaaagagaatatgtaccctcttgaatttcttccagtattgggttctccactctctggattgcacgtttgatagccaatgatttttgcaacctaaacaaaataagaccttcttaagcaactggcctcagcatttgactttcaatctgggaagaatcccacatgctattcaatatgcccccatagcactctgcctaggtacttcccaaactagcacccattaggcagcaccttactgcactcacttcacagaagtctttttctatgttattgcatcttacattttcctcggctgtctcttttcctgccagccaacagttcttgttgtttttgttattttgttttttgagacagggtctcgctctatcacccaggctggagtgtggtggcatgaacggtttaacttgtgctataaacctaaacctctatctatctctaattgtgccatacacatacattttagctacagaattctggacctagatagcactccctgcaagcttggacttgccacctggaattcagaaaaagtattctgctccctggtgttaactacctatgctgaccagttgcccaaaagaaccttagggaaaggtttctcttattgccccttgggccaccagtcaaaccatcggtgctcttaggactgccctctaaaaacacagaatttgccatttacatcagctatgtaatctgcattctggcactaccattgcctggcacccagccattaagcctggcagcagagaacagtcatagtcttctcgctagttgcccgctccattttggcaagatgaatgctgtatcattgggaaagcagacttaattggttttctgggggtgtttagttaagtcaccccacctcagctccaagttgatggaagtgtcactttgccctttccaacaaccagagcaaataaatgatggggacatactccaaaatgtacatggctgagtcctcttgctctcctttttttttttccccagtgactttggggaggtttgggcagtgatcctgcatacacaatactgttcttgttcttcttttctcttacagagcagccttgaatagctctgtctaaaattattagcaggggcagccctaggctccaagagatcacagccctcatgctgggcctgaacaaagaccctgctttttcccaacaattagccctgcaaaaaaggacatctatctccctctattaaaaccaccacgtgccttcaagtcagcccattgtaaagctaattaaataacacgcctctctccccatgcaggtctcctgattagctttcctctgtcagaaacctctgcaaagagcctagtgatagacaagccaatgttccacttctccttagccccgctcccatcgccaattagccgtcgcctttgaaaagccatccttatcaatgttggtgagtttgttcacgctccatatccatccaaagcccagacgctagtcacctccaccttaaaggaatggataaggttcatactgcttttaaaataaattatttggaaaggcaaaagttttcatcacagtgtaaaatctttggccagcattccccacatcgcaatacacaagggctgccgccgccattgcaggagagtgtcagagaaggacttttctgaaagtcagagagcctgggcaagatgcagccaaggtggccatttctaccagatttctaaaaacaggatgcagaagaccaccctttaggttaaactcccttagatactcctcaccgccaaacagataaaatccaagcacagtccaaaaggccaaaattggtcctctttaccttttgaccacacctcaccttctcccccacatagggaccctgctctctgacaatcctggacttgtggcaatcccttgaacacactctagttcttcactcttttatgcatttttacaggcttttttcccttctggaaagccctgttctacctgcccagcacctctgtcaagactcagcagtaaatcacctcccccatggtttccaaggccttgctagataaaatcaggcacttcctactctgtgctctcagcagcacatataggtttccaatggggcgcttacgttaccaaaaataatctgagcccctcaagaacagcaatcatattctacttaaatttgaatttccagtttaaacacaaggacttagtgaatgcttaataagtgttggaagaatagataactgagtaactgagtaaatgaaatgagtaagtaaaagaatgactaaatgaatgaataaaataaccactttataccaaatgtgatctaagatggtacattcaggcctacttccagcttcgctacagatggtctttgtgcatagtaaagggcgttattattttatgacatggttttctttgtttgaaattgtcagatctcctacacatgcacacatgtttacacatgcactttttaaatacaattttttaaatgataaaaatggagggagaacaggccagctattttctaactctgcttaatagttctagagcttaacttttcaaactagtctttgaggtttctagctgatttaatctttagaccataaaaaatttccttccaagtgtttttaggaagactcaccagtcttcttggatgtcccatacagatgagtagatgactagactataaagaaatcccatatacaatttaagttttccatgaaatgctcatagacctcaaaattagcaatgaaaacaagaaaattttttccttttttaagaatattttattttaaggttcagatacacgtgcaagacatgcaggtttgttacacagataaacatatgccatgggtggtttgctgcacctgtcagcccatcacctaggtattaagccctgcacatattagctatttatcctgattttctctttccccgtacccctccaacaggccccagtgtgtgttgttcctctccctgtgtccacgtgttctcattgttcaactcccactgataagtaagaacagacagtgtttggttttctgttcctgtgttagtttgctgaggagaatggcttccaggtccatccatgtccctacaaaggacatgatcttgttcttttttatagctgcatagtattccatggtgtgtgtgtaccatattttctttatccagtctatcattgatgggcatttgagttgatttcctgtctttgctattgtgaatattgctgcaatgaacatacgcgtgcatgttatctttataatagaatgacttatatttctttgggtatatacccagtaatgggactgctgggtcaaatggtatttctggttcttgatctttgaggaattgccacattgtcttccacaatggttgaacaaattcacatttccaccagtagtgtgaaagcattcctatttctccacagccttgccagtatctgttgtttcttgactttttaataatcgtcattctgactggcatgagatggtatctcattgtggttttgatttgcatttatctaatgatcagtgatgttgagctttatgtcatatgtttgttggacacataaatgtcttcttttgagaagtgtctattcatgttctttgcccactttttaatggggttgttttgtttttcttgtaaattcgtttaagttccttgtagattctggatattagacctttgtcaaatggatagagtgcaaaaattttctcccattctgtaggttgtctgttcactctgatgctagtttcttttgctgtccagaagctctttcatttaattagattccatttgtcaatttctgcttttgttgaattgcttttgatgtttttgtcatgaaatctttgcccgtgcctgaatggtattgcctagattttcttctagggtttttattggaaaacaagaaaaattaaaggacttggcaaaatagattttgaactctgccaaatcccaaacatttaaaaacaaccaaagtcaatgagtgggtctcatccctgacacatcaagtcttatggcaaaaatcactcactgcctgatgaatcctgtgtaccttcatgtctatgcatgatgacatttagggccagctctttccttgctattttaccaccacaatctcaacttttgaaaagttgtgtctttctaatattcatgggcaccttccagatagaaagagaaattaagacacaaagcaacaggaagattccatgatcttgtagttaatcagtaattgtatcagtaagagtttgcaacctccaacctgagatgaagcaagcaaacattgtcattcatttggcagtcactttgttctggcaaggttcctacttgttaaagtggaatgctcactttataatgatcataatggattaaaagctgtaaaattagactctggctggcagtaagttctttattactctcccttaccacagtgtgcctccattctcagatgtttccttaaagaagagtaatctaagacctctaaatacataaaaaataggataataagtaaagacaaagagaccctcatttttatatagatttgtctcctccagatgcagcttggcatgtatacatgtatacaaagcagccattgagaattaagcatgtgaaaatcacacctgttaatttgtcaaggacagaccaagtaaactataaggcagaaataaaactgtttcaacaaagataaatggaaaacatggttgaaaaagaagaatgatttggaatgaatgtcatagtattaatcaaataaaaatataagatgcatatagtcaatataatttattcaaatagtaagaagagaagaaatatgtatcataaatgaacattatcatgagatattgggtacaagaattcaatacattgggtaaacagactgtagagatcttaagagcttaagatttcagagaatagcatacattctgtggtctagaaaaagctgttttctgatccaattgagactgtgagcaatgttaagaggcataacagccaaatcaagacacacaagaagcctctcattaggaggagaaagagcttggaattggttgaagggagcagccgtgttgacagttcatgtcaatacattccagttagcaggttatttaagcaatgacttcaggctaagctggccttgtaattctgcaaatcagatcccatagaagagcaattagcagacattcatttcatactctcttcataaagtttgggtcattttaaattttttatgtgtcaaacttcagaagtaaatatgaatacacatcacctctttcctttgattaaaacaatagggatgctttaccttatttagcatgaaagatcacaaaataattccaacatcacctcacagcacctctgagaaatgcctaagaggtgggaaaggatcccagcctcactgtatgcagtatctgtccagggtacagagactctctccaatgttttgcacaactttgatccaagtcagctgtgcaaaatactgaagatgcatattagctcaactctttcaaatcattcatgtgtccaaaatcactttcacctaccaaagtccttaaaatgtgattttctcctgccaagtctttagtcgtcatttgttggtttttttaattagaccttttatcactatgtaccataatttacctgagacattattttcccactaacacagagtgtgtagggggagagggagggaaagcatggcatggtgaataaagagactattaatccactaattcctacttgtctccactcagagtcggaataagcaaagctgtcattgggaggtggatacagtaggatcccaagtgatgtatctgcctgagttcaagtatgaactggaggaggaattaaatcgcagttgggaattaggggaaaggaaaggaaagcaagggctcagctccctacccctgggaactaaggagcaagggaaactgacatgaaataaactcctgcacccaaaacattcaaagtcgggtgcacaccttcctagcagctgcagcaggaaaacactgggaaacctactaaataagagcagctggtcacggaacatatatttctaattgtgctttttttttaccacttatacgtgtatattggaattctgtaataacatgttccaatagagacttcaagacaaataggacatagcattacaaacacaaaaacaatacattctgggaaatattccattgttttaaagctatatatcccaaattcttcaccaaaggccaaataagcacctacaagaagggagaagaagtaatgagatggggaagaggacttagaagatgacttcaggaataatatgtattgacaccttcaatataagaggtatttccactttccttggattcacagtatttattccctcaaattgaatatattcattttcttaaaagtcttgtatatggtaaattcagtagatttgggatgtttgccacacaactattagtgactttctttgaaacttaccgaagaaaatacaagaaaagtgaaaaaaaaattaatgtcttaagcagaaacactcgcattaaatgagatttaaacaactgattaataaaagtatgatgaaattatcctagaaaagtctactgacttatttttccttcttagagttcaaacacacagaagtaacttgaaaattaaatactttgattgtaattcaggaggtaagggggggcgttaaccttcctatttagagatgaggaaattgatagccatttagcataactagattttcagatctgcattcttcacaaattgcgcacatagtggctgctttatgttgcttttcctggttactattatttcacataacatgcccaaggaccggtacagtgtttcataccaggctacagagtcaggctgacctgagctcaaatctggggtctgtcactcacaaagagtgtaacttttggcaagttatttcaactacataaatctccctgcctgaaaaatttacttgtctgtaaaatggagttaataattcacagaatctttggtaagatttaaacagggtaatgtatgtaaaatatatggcagtgcctggctaaaagtgaagaatgaatactggtagttttattcaggtgaaaacacacacacacacacatacacacatacacacacacacacacacacacacacacacacacaccaaaccaggtttgaactcaggtatcctcaaaatactcatgcactgtagtgagcagtattgaggaaccacttaatacaaataattattttgccatagattaaggaggtagttcgtaggtgacatatgtatttaaaaatctctatccacgacagtggacagacaatggagaaagaatactcttttaacaaataataggggagaaccagatacacatacgaaaaagaaagaaactagacctttgtgcataaaagttaactctaagtggatcagagacataaatgtaagagctaaagctataaagctcatataagaaaaaacaggattaaatcttcataaccttgtgttgggcaataatttcttaggtacaatgctaaaagcactagaaaaacaaagaaaaaatagataaattgggctatatcaaatctaaaacctatggtgctgcaaattctaaacatccagaaagtaaaaagacaactcactttatgggagaaatatttgtaaattatatgcccgataagggcttgtattcagaatatgtaaagaactcttacaactcaacaataaaaagacaacccaatttaaaaacgggccaaggattttaatagacatttctccaaagaaggtataagaatgactggtaaacacgtgagaaaagctcaatatcattaattattaaagaaatgcaaatcaaaacgacaatgaaatactactgctcattcaccatgaggataaattggaaccctcttacattgctagtaggaatgtaaaatgaagcagccactttcaaaaacagttgggcagttccacaaatagagttaccatacgacccagaaattctacccctggagaaatgaaaacatattcacacaaaaaacttgtacattaatgttaatagcagccttatttataataaccacaaagtgaaaagcacctaaatggccatcaaattatggataaataaaatgtgccatggccatataatggaatattattttgatgataaaaggatatactgatgcctgctacaacatgggtgaaacttgaaaacattatgcttagtggccagtcacaaaggtcacatattatataactctacttatgagaattccagaataggcaaatttataaagatagaaattagaccagtagctgttgaggtgtggagacaggaagaatgagaaagaatgaagatcgactgctaatggatataagatttctgttaagaagaataaaaatgttgctgggcgcagtggatcatgcctgtaatcccagcactttgggaggccaaggcgggcggatcacctgaggtcaggagttggagaccagtctgaccaacatggtgaaaccttgtctctattaaaaacacaaaacattagccaggtgtggtggcaggcgcctgttatcccagctactcaggagtctgagactggagaatcacttcaacccaggaggcggacggaggatgcagtgagcggagattgtgccattgtactactccagcctgggcaacaagagagaaattccatctcaaaaaaaaaaaaaaaaaagaagaagaagaaaaatgttctaaaattaaattgcaatgatagctgcacaatactgtaaatacactaaacagaactgtacactttaaataggtgaattgtatagtatgtgaattatatctcaataaagctcacctcaataaaccgtttaaaaaaaaaagttggttttctggaggtgaaggcaagacaaaaaaagagggagaatttcctatcatccaggaaagcctgcccagtggggtctatgaacatcatcttaagaccatatgcttcaccaaagttcagtggaaaaatgtctaacatttccatgaccttcttttctaaacttcctaagtggcttagagagaggctgcccgggaaactccaaatggaatttaaaaatattatctcctggctttataaacagcaaggagcactaatgaagtgagggagcagcggtcccaggaatgggatatttcattcagattgggagccccgtgtggagtctaagctcatctctgaaagcggcaggaaggccacggagaggccagaccagggtgagggaggtgaaaatcaacacaggagagagaagaaagaataacaacgctcaaggatacataaagcagagccggagtggccactcttccaaacaccagtaaaacaacccctttccaaatcgagctctgtcctcattctgccaactaagtttggatgaatgagtgctcctcaaggcaaaccccctcaccctcagtttcacgtgactgggaggcctcaggagggtctctccataattctagtctcaacaggaccatccctctcatcattcccagtcccctggtgctcaccagctctgcagcttggctgtgtccgtctcagcacggcagccaggttgcgtgatgttccttgaggatgagactgaaccacacttcatagccccaacgcctcatgaagaacaagggcttaataaatatgtgttgattaataggggacaaagtaaagatgctctaatgtcactgacaccctaaaccagtcagtaacttggaattacccatgatctaactgaggaccaagacaccaaccatccctccactagctaggacaagtttggacaaccaggatacaaatatttatcaaatcctctgctctgtggcaagtattaggctaggcattgaggatacagaaataaatggtgaagtccttttgccttagaatgagaggaaccataacacaaaaagtcttctgagctgatctttgggttttattccaaattactgcaaagtttgtgttgttttcttttgttttgttttaatttttgttacttcttaaccaatccttataatcttgggtagtacccacaatgatcctgacagattaatttaataacctggtttgattctccacagaccttaactgagtgtccgtggcaatttaggcactctgctaggtactagaaacatgacaaggacaaagcccctgacctcaagctgtatatagtctcagaggaaagacaaaacaatgattgcaatatggtgcaatgatctctacaatacaggtattcaccagtatcatgggaacacaattggggtctcaacacaggtattgattataataagggctccacacgagaacaatgtggaagataaagtcaatgggacttgtgactgaatatgaaaatagagtggccatctgctgcttttctatctgtagtcttttccttctttttccagtacaggaccccccattttcctttaggaaactgtctcttttttacacagtatagttctggtggaactgctgatcacagtaccccctacaccttctattcacagaggtggtacatgtctcacatggtgaattagaatgccccagccccattatttcattcattgccttggggatgggcacacagaccaggaattttatatataaccattatgaacaaggcattctttgatgaggtctatgactatggacttctcttcttccaccaaagcagatgtgagctagaatgacagaaaaggaaaaggggaagagggaggaggaagagcaggaagagaagagggaggaagaggagggtaaaagagagactttagaagattattggattccctggaatcaccaggctgactcttctactggacttcccatctgttaagtcaggaatttctttcttacactgaagctagtttgattcaggtttctgccacttaaaaacaaaaagatccttccttaaccaacacaagtgttaaggtattaaaaaaaaaacaaaacaaaacgggagagggagtcaataactaccaattccttagcctggtgattggtagctgatagtgaccttcatcaaaacaagagagaagataaagacagcaacaacccctccactagctacagagttacaggttacagagtcaagagaaagcagtgagctcagttttaagtctgaggtatctgtgtgtgactcaggtgaacacttgtcacaaaaaatacccatggaacacaccctccatgtattaacccttaagtgatgacaccaaaatgcctttcctccctattattctttgatttataaattttctttaggcccagcgtggtggctcacacctgtaatcccagcactttgggaggccgagatgggtggattacctgaggtcaggagttcaggaccagcctggctaacatggtgaaaacccgtctctactaaaaaaatacaaaaattagccgggcatggtggcaagcgactgtaatcccagctactcgggtaatcccagctactcgggaggctgagacaggagaattgcttgaaccctggaggcggaagttgcagtgagcccagatcgtgccattgcactccagtcctggcaacaagagcgaaactctgtctcaaaaaaaaaaaaaaaaattatttaaagaggtatttttttataataatttatttttcaaaataaactgaatgtgatatatatgcacatagaaaagtactagttcatagccaggaagagcgaaaagattatgcatttcaaagctaccagaacagcatagattctctcccccatctttgcagcagaactttcccttctgttaaacacagggaaaaatgatcactctctacctgcccattctgacatagacattgggaagtttggaaaatgagaaaagtaagtgaccagtaactatgggggaggtgcagaagtacatttcagaccttccctccttagccccaaaaatctactggttgagttttcatatcagcatgcccagctcatgcctcctttttgtctctctcactgcagcagaattaaaagattactctcacactcaacgtctctcctttcacatctggcctgctctttcccactcaataatttcctaaagcattcccttaagttccttaagttcccttaaaaggttgtgaaaattttatcttacgtgatcgaaccagaaggataataataaaaaaattactcatactccttctgaaatatcctgaaagatatttgagaggagaggtaatttataaactctaataatggatttcagagtcatattttcccctcactaatctaaatccctgtttttccatttaatctcattgtgttcttagtcttcagtggatctaaaaaacagctgttgactccctgatgacattttaggaagagttaagtctacacttgtatttaatcttaattaattttatacttaattccaactcactgctcacctgaagctcaatgtctatgaaagataaatgaaaactctgaagaggaaaagtcaagcaagagatgtgtggatacatgttctagcaattaatggtatggtactattaaagctgagtatgtccaaattatggaaactgccctaaatgtcataagaaagtcagttccttgtatactttataatttaaattatattaaaagctctttgagataaaaataggcatagagcaaactgtttcttcaactgctttaaaaacctgtgagatcagaaaggaattttgaaagggcagatgaaaaagtgattaattgtttactaatatatatatatatatatatatatatatggaatttccctcttctgtagcccagttagtagggctgagagatgcaggcagccctagggaaatgtagggaaatgtggataaatgtactgaagctacaagcctaatccctgagcccctcacccctgccttctcccagttctgctcaaagacattgcaattccattcttttccaaggctctccctctccccgtctccagagcagcagctctgcatcacattgagtttaaaataaagaaatgcttttcctaaagaattcgcacacaaataatctcattaccccagtgcttaggtttatacagcagacgtcttctgccaggaaaaggaaaaaaaaaatgcactctacactcactcacacggaacagctgcgaggagagaaatggtatttaattcattgtgaaatattcaacaatggctacactgcacttttaaaagccttttgatagtaaaacccacagggaacagcccatcctgtgtgctgaaaagcagcttccccacaattagtctctctattcagaggtctgggaagtctgtgtaaacttcagcacgtgctgtgtacactgtgggtagcttcaagggtataacctttcagaaacttcttagggtttagtcttgctcagtgactctgtctgctcacggagctggctggttgggggtggggggggcagtgtaaggggacaaagggagtatgatgcttaggtgaagaggtaagcaaaccctctagaccctaactgaatgcccaacaaaggaaaaaccattctctggaggagctttgcaaattatcaggcttccttgtgcccttaaatgaccaatatgggactccaagaaaccacagagaagatataaaagaaatcaggtaacagtgtcttgttttcccttttacatccctgtggaattttcatgggtctctgctttgtgggaaagctgggaaagtttatcgattcttatcccggaggtgggcaattgtcacagcaatgaagatgtgaacaaatgtttgggcaggcaaaatgtgtatggtggttaagaacatgcactttggaggaatatttacatttaattaccaacctgcctcccagaattagttaggcttctttggggaggtaagttgacctctctgagtcttatttatctcatctgtaaaatgggaatagtatcaccctcacaggaatattgtaaaagcaaaagaccacatatgtgcaatcctcggcatacagaaggcatttaatgaatggtaaccactgtacctctcaagcagctctagaagaacaggccttcttttggactttctggaataagattactagaattagaaaagaatgggctatgaactatttttcatctctattttaatttacaattgatcagttaagaagcaacatagaaatatgcacagatatctaacaggaagttccgagggatctaaaccatgttaaaaacacaacaaaagattacaattcaagaaaatgtggcatcatggtggttggttttattgttcagaaactttaaattcagagtttttaaagcccaaagtattgatgagatgtccaaatatttcaggtatggttgaagtgagcacaacaactttctgttatttctaatctgtattcaactctccaggaacagcccacaggcatttctgtctcaaggagctagccactttcattataaaacccaaaattcaaccagtgaacattcaccaggacgcaagctctaagccctgctcagctaagaatatccacctgatatattgaccaaagatgaaaatgctaagacattgctgggaagttcaaagtagttgacttgggttgggtaatctgtctagactggagaagtctgaaaatggcctcctcttgtctaagtgagtttgtagcagtagatgttaacagtcaatggttccaacagaagctaatgatcagaaatgagggctaagactccaaaagaatgaccttggttcagaggcagtgcactgaaagagtctgtagcatccaggagtttttctgccatagtcattcctgtatacagtctcttggccatgagggattggttccaggaaaaccccttgcctaagataccaaaattcatatacgctcaagtccctgatataaaatggtgtagtatttgcaaataacctatgcacgtcctcccatacactttaagtcatctcaaatttacttataatacttaatacaatgtgaatgatatgtaaatagttgttatactgtattgtttagggaataatgacaagaaaaagtcagtacatgttcagtacggatgcaaatattctttaaaaaaaattttttttttgctctgaagttggttgaatccatgaatgcagaacccatggatacgaagagccaagtgtacattgtttgcaggggggaaggtgttagctctgaatttctgcacccctatcccctttaggggcactatttctacatcttttcttccctatatgacataaggatgctggggaaaatctactgtgcactagaaaggccatgagacgcagatcatagtgtgacttttctgtggtgctttgacacagactgaagctccccatccctacctccagctcactttagggaggtcccaggtccacagttttcctggggtgtttgcagagatcatcctgaggagcatgaaataaagaaatatgttaaagaaaaaggagagatctggctagactttgggcaaggctgcaatgcttctgtctcagagacaatggaatggaaacaacttccagatttaaatacactcccttgggactgaccagagcagggagaagggatttataggaaggaagtttataccagagaattcatcccagttcaacaaaatgtgcactgcgtactctagaagtacaatgtgctaagtgccgcaggaaggtacaaatgtacctttcccttggaacagtagtttttaacctctttgggagtctcagacaactttgagaatcagaggaaagctacagatccttagaaaaatttctgcacaaaatttcagcaggatcacactttcctgaaactctcctgggcaagaacccctgctccatgagaaacagcaggtctaagacatggcagaaagttgtcaagattgatgttttaaaaatgtatgaggtatgtaagatagccagtaaaaatggcaaaggcaactggaactctgtagctacttaaatcactggtatttctgcctctcaggcactacttcagcaagtctcaggaggtatggaaaagactgatgacacaactttgaaaattggtggctttgtttttttggtttttttttttaatcccacctaacagagatcccaaagtcctgttttcttaaatagcaagaaagtttgaaagaggcaaacaattcttcaaaggtcatgaggaatctaactaggatgtccaggaatggagtgggagaagcgtatccctatttttaaaaaatagggatgatggggagggtgtggccaactgactagatcaagatgtggggcagggtctggactgaaagctgaggggccactcacactggcagctttggggacagccaaggttgccccatgcttcagtgggaaggtgatttttctcagagtgcaactacatttcatgtttgactgatgacctctgtcccatgagctatttatgctcttcagacagcagtcagggaacaagacagtgaagatggaacctggaggcattcaatagggaaaaaaagagagaaagaaaaaaagaaagagcgaggaaggaaaggaaagggaaggaaaggaaaggaaaggaaagggaagggaagggaagggaaggaaaggaaaaagaagagagagaaaaagaagtgggggagtgagagacgaaggaagaaaaggagggaggggaaccccgggcaattacagtaatgtatgaaaaggtaacctacgaaatcagagttaagagccttctccacgccatgcctggtgctttgccatttccacattcaatacgtttttttttttttaatttcttccttcacagtaattctgtgaggtgggcactattatattacaaatgaggaaactgaggctcagagggttcagtgattcgtccagggttgcacagctggtgggtggcagagctgaaacctgtgccccaaacagccctacccagctctcttgatcctttgttaaacggtaacgacacacactcttacctatctctctatgtccccaacctatctggaactccctgtaacctcttgcaaaactaaatctaagcccagaatctcttctgttccaaccgtctatttcttaagccccgcttggggcccaggcgctgccacaggccgaagggcgaggttcgggccgaggcagcccacgcccgtcctctcctccctcctctcctgggagtggaaagctcgtcccgggacgccccagctccgggccggcttcgcctgcgcccgcgttgctggcagcgccggggttaaccctcccgccctgcggagcaatgatttctgttttatttcagcaggggaagtgtgtgctgcctgattagcctgatggtttcctcttttcccataacctccagacccccatggcccaagtgtttactctctgaaataaaaaatctgctggtgtttttctttttgtgtgctcgtgtattttgggaggattgcaggggaggaaggcggggtggggttagggaccgggaggctgggggaggggagcgggccgcctcctccagctgcaggctccgggctgagacccctggctgcagtgcaagaaagcaacttattaatgagggagctgggtctcctgcctcggcagctataaacacagtgaacatctggagagagagcccgtgtctctaggcggccagacacagcactacaggctgtccctgcggcgcagcccgcccccaccctccactctcacgcgcccctcgcccctcgcccctcgcccctcgcccctctcctgggctccggctcccacctcatcggcccacccgaagatgtccattcacccagtgccgcggccggagccgagcggggcctgacgccagccggcggcgtccaccgtcccacccccgtgcgaggagttccaggagaggggtcaaactgcttgaatcgcataagaacccggtgccccagggaccttttcccaactcggaccaaatatttgtggtttgaaaaagttgagagaacgttttttctctccgcagccccctgggagtcccagcgcaatgctgttacttcctaggatgttcgagaagctgcgagttcgagggcgggccggcggaaggcttgcctttccactgtcactccacgaacccagcccagaggcttcggtttgtctgtcttggtttccttccttcccggggacctaaaggggtgatttacatttgtaaaggcctttccaagccctccttcctcggggctgttggggtcactcctgagagcatggggtctctggtctctaacctgggtgtgcagctctttctggccctcaccaggctggcctctcctttggctggtgaaatgaggcacagtgggcagatgctagcacattagccttgagcaagataagagtgggcaggactcagatgtgagtgggcatctggtttcttcgattcacctaaatccacactcacaccatggcgaaaggaaaaagaagaaaagcagcgtttatttattggtcccctgcgataggccacgaccttttaactatactaccctcatgcagtggacacaagaactctttggaaagagtgtatttcacctgtgaaaggtgagggttgggaagctcagtggacttagccaaggccgaaggcctgtaccgggatgtgctgctggggtcttgaggcataggctggctcttcccacaacaccaggccaaaccctctgcttagacttaacactcttcaattatactcaaaatgtataccaaaagaccttgtaatctgaatatgaaatagtaccagctcaaaagctaccaaggcagcaggaggtgggaggaaaaagaaagaggccatgtaggaagcaggagcaacttcagtccacagctgatcagaggcatgccctccacttatggagaatagggtcaggcatttgcagaatctcagtatcagatgagcaaactgacagagcgagtgtgcgggagatattaggcatgtggactctccctagcggactgcttgggctaggctggccttgctttccttcctctttccctggccctctcagagatgggatggggatatatggcaaggctgttcctgcatcaggcttctctcagtactctcccctgggagtagcttgtcagggcagctaggccccaacctcggccttctgtgaaaggctggaacctcaggtagggttacagcttgctcctcccaaacagcacagccatccaggcagaatccaaaaaggtccatgtttccccatctcccttaatgtttggactttatttaaagacaggagtttaattccctagtcttgtcctagaaaatagttgggcattagcatagacagttcctcactgagctagaaaattgaaagaataaaataaaataaagagactggagtggcccagttgtgtttctaattcactttgcctggactccctgtaagtcttctctaagaagaaccgtccagccttttctcagggacagcattagtccaatattgtaatcgtccaatgttacaacatccctaaagcacacacactctcaggaccgttctgttctgaagaacaaagaacctgacacacaccctttagaaaagaaaagcacaccctgaatgaggaaagaagagaggggtgcagcagatgatagtctgaaacaccattctgtaaaaccacagacctgccataagaataaacatttcagagcaaggtgagtctccatttaacaagtctctctggcactccctcagcgctctcaacacttaaaagccaaattggaggcatctgtgcttcctgctgagacatcccacctggttgtggatagccctttccaaacactggcccaggtttgatctctcccagccgctaggccatatgagaaagccccaggagggactatgaactcggaatctcagcgtatctcccacttgaacttccaaagtttatttgggaaagacattctttagttccaccattttgttagtaaatttgttttagagattttagtgagatccaaagccacacattaatactgccaaactttatgtcataaataagtgtaatatttcacatggaaaccatttgctctagcatgtaaatgtacacccacacacacacttgcatagaagttgttttaaaggagaactgaggcttccccttttccatgtattttctcagtatcccgggcatggcactggtcaccaaacgtgttcaaccaatcagtgggtcactctctgactcaatgaaacccagtttggactcccaaaatgcactttgggtcaatgagtcataatagcaaatattcatatcaggcttgctaagtgacggcactgttttatgctttacacatactaacttagtggttctcaaagtgtgatctctagaccagcagcatcagcagcacctgagaacttgttagaaatgcaaatttttgagccttagcctagaatcactgaatcagaaaccctgggggtagaactccataaccagtgtcttaacaaaccctaaagtgattctcatgtaccctgggagtttctgcttcgataagtctggggtacggctcgagattttgcatttctaacaagttctcagatgatagtgatgctgctggtctggggaccatgcttggagaatcattggtatagatccggaaactgggttacaagattaagttgtctaaggtcacacagttataacggaagagctgatgcaaacacaagcaacctgggtccagcgtctgggttctttcctactacactaaatagatgtcctttctcatgaagaatgggaagtggcagataggctgtgaatgtggttgagtgaaggttttactgtgttcagtgaccaaagacatagcaaactgcattctacaagaaaaagtattgtcttgtttctcaaatcaatcaaagaccatggtaataagactataggttcctcctcatgaaggtaagttgtgtttcctatgttctctagctccaggctgcttcccagctctaagcaagtattttgcaaaagtgtactttgctcacaacatcacatccataagtttggctgatttcagacaaatccatccttgaaatgaaaaataatttgatactataacactttggaagagtgctaagtaagcatcgtattttctgatatgaactatgaccattcatgagcatcataagggtgaagttgaaatcaaatatggaccgctggcattgatgggatggacgaggtcttgtgtcctgtgtgctcagctgggtctctgatgtcggttttggaaaacaggcagtgtctgacttcagctaggtctaggcaccactctgaggctcgctaccgttaccctgtgtatccaacaggactgtgggtaggaaccagtcatgacagttaatgacggtaaaacgtcagtgagctcttagagacaggagcaagaaactgaaacgtaaaaatgattcttgttatggtggttggagagaaagggctgaggttgagggacagaatagaggaagggagcagagaggaggcagggtcagtggctccactccagtcagactataaacagcaacagacatttcagccgtgtcttgtgtaagaggctccattgattcacaaggttccctaacagaaggatgacgagaagctgagacagaaagggcccattcattcatgcagaacaccagcactcagccccattggctctcgctaatggctccaggctgatagggaggagggggaagaggcggacggtaggaggaggtagaaatgaaagaaaatgatgactacaagattgttgtgaagaaatgtacagctgcacaggcaattgcatgcaaatgtggcttccctttttagctgtatagctaatgtcctcagattcatctatttttctctttcatgttatcttcccctcctgttcttgccttgtctttttctgggctccccactttttttccctttcccattcatctttcatcttcctttcccattattccctaccatgctactaatatccacctttattttctgtccattttcacacatctcttctttcttccaccatacccgctttatcatctattttgtccaatcgattcccgacagaccttggcgctttagtattctctcccactcacctgataagtctttccctcattcatactttctctctgcttgattctctcttccccttccctccacactcccgccaccctcctcctcctcctcctcagcctctgccccttcgtgaataggaacaacattctgaaaaggcttgctcattccttgatggcccctcctgtcagtgttctctgcactgacagatgtgtagtccttggaaaagaagttcattcatcccttctgagagcatgaacgtgaagggggagcagtggtgggcagtagccatgagacggaggacgggaaggaaactgaagttataaataggataaaagaagatgaaaaaaatgtcgagtattttttctctttctttatattcaacacatctccaaggaaatgtaccacagctggagaaatcactggttggtctatgtcttcatctcccttccctataaccccacaatccccgtccaaacaacacccatcgctgaggagagctggaccacagcccagaaataatccctccaactccttcgtctgggaagctcaaaagttaaaggaggggctagaaaggctcagggttcttgccaaacatttccatcagagggagtataggacagtgggaactacaaccatcacatttgtgaagagattgcccccaactggtagaggccacaccccgatggaagctgtgtaccatctctgagctgcagttgatggcaacccaggtcattctaggaatggttattatatgccccaatcttctcaacctaccaaaagctggggtgaccccagcttccttcttgcaactataaactatgagaagaagatgatattaccctgctataagtccttgcattttaaagctgttcttcatatgcttcccagacactgtctcataggccatgaaataaaaacatctttacctttgagaaacttgacaaagagcagcatgaaaaatcatctccacttgggagtttatgtacttcagtttaaggaaaaggaaggccatgtctctttgctatgaagaagagacattctgatcttcaggctatgagcaaatggagaaggcctcagatgttaataagatgtaacttgtagcaagcagagaccatcgagagctgcaagtgttaaagcaaggcagctttaatctcagttgcattgggagatataagacttaagccttgtggcattaataggattcaagaattatacaaatataaatacagccattttgaccttttgcttatacaaacaaaacctattttgtttagaattttaaaggatcacttttctcatgtcctcaaatttttagtccttaagtctgacgtgtgagcaggtacaaaatcctcctggctcccttgtgaaatggataggtagctgagacatttgtatttatgcttagaagaactgagataccaagcagaaagtgacagcataaatattattatgtctacaatccaggacagtgccaaagaatacctcaaagatcaatggctattgagtcaagggaacatgggacacaggaatctatttcattctgccctggagagaaaccaggcaaatggaaagctactccccatgcctcctcacccaccatacacacagcccatggagtgccacagcatcttgccctgcgtctgtttattcctgatgagcaataaagcatgggcaacaaagcaaacatttattttacttctccactgttatttaagtaattgaccaaagaatgttgtggggtaaaataacactgaaccaaaaagtagccttcaagttagtgactccccctgccatgccctgcccaggtctttccccagaattacattttcccaacatgtaagagtaatgacatttttatgctaagaattcatcctgggagaaaacacagattttgactagctatttggtattcaaatatgttatcataacatggtctcatgtgaaagtgaacttaatatctgaattgatcatttcaaaattcccaaattcaaatttaatggtttttgtttaaaaacaaaacaaaacaaacaaaaaaaaaacactagctggtaaaccaagaactagtggaatttgtgagaaacagagtgtctcctgaaaacagcatggagatgaggacttcagattcctgaggtccctgggaatgcagatccattgatttgagagttctctggaggagactcccactcaccagagggcagcactgccaccagcaagtggaaggagagaagggagagagagacagaggaaaaagaattgggatccaggtgggcatggacagagaggccaggaacaatggaaacagatgatcatcgaaagaaagcatgttctctaagaaggccgagcaattcacacacctctgtttatccagctcagactctgtgactgcaaaacttctaggctctctgacaacagccaaaacgggtgtcaggaaatgcaggataggcaaaactatttgcaaggtgaagacctaaagcaacctttcttgggcccattcctagagtttagacttcctgtcggggaataaagtaacccaaaatttatggagaaggcccgggactttccattcaagaacaatagcatctgtacccgcataagccatggcagctgttatttgaaagaatgcagccctcatcacatttccattgtccttcaactctatcctcattcccagcttttgtttatgttcctacctgagacacagtgttcaagaccagtaggaacttcctgagttgccatctcatcccaaaaggggtagcaaggtctttgctggtgataattggactggaaaccacagttcattcgaggatcttcataagtgttgctaggtccttgcctctgtgcaagaaaaaatagaagaaaatatattaggaggaaaatctctgttgtttagccctaaagaactatgacttcatattatccaatcacatgtaagtaagaatcatctatagatgatgacagaacagagccaactcttgttttcttcccttatccccccacataaagacgcagggaacgagaagaatttctgactcagactatgtatgaatttatcttcctccatttcttcaagtgtttaaggactaccttttctggccttcaaataagaacccatggttaacagcagggccgaatgctgaccatcttgaatttatacactcctggcttatttttaatggtaccttactctgtaaaaacgtcatgaaaggatattcttacaaggcttactccacaatcatacaacaagtaaatgatacatgccaaaggaaaaaaaaatggacctatgtaataaaattcacctcattttttggttaatcagtgtgtataggctttaaatacattggttgctaggcagaaattgtccatttgccccaattttcgaagacttgtgccacactcttagtaattttatgaactccataaaatatacaatcccaatctacatagtactctctaaggaagacagatgtgctgtgtggaaggtcatgttttgctgtgtttaaaaccctaggctttgaagccaggtatacataattcaaatcccagctctatcacttaccaacatggagcctgggcctgttccttaatccaaaccttagttcatgcaattgtaaaatgaaaataatagaaactggaaacatgtacatatagctctagctactcgggaggctaaggcaagaggatcacttgagcccaagagtttgaggctcagtcagggcaacatagcaagacccaacctctaaaaataaagtgaaagtaataatacttacttcatgaagtaggacgattgaatgaaataatgtatgagaaaattgtatataaagcaaattaaaatataaaattgcatttaataaaactatatattgtatgaaatgcatgtgataagtatgtgaggcctggtcttcaatataagttaggcattattttaatttaagagatccttaacattcctggaaatggccacataggttaaaaactaagacacaaaaggaaaagtagcaaattcacagaaagaagatttcctgagaccaggattctaatcgacactggcccatcctcaactttctttttttcttttttattattactctcttgggtccctgcaccttcataaaaaccccaactaaggaaaccaaactctgctagaatttaatatggttaaatctattgacattaaggtctcaataaaggtagctcataagatggtattctcacccctgaagactagcttgcaactcccagaaagattctccaactggagaacttacgtcttctcttcttctgagcatacaagaattcagtactactatgttagattcagttgcccactatctgctccctttcccaatttgcaatggcccattcacttaagatcagtaaaaataacagaagagaatatattgacacagagaaaaatgacaatgaacccaaaaggcagaagaaggttccatgcacatgatattggacctggtgttctataatattcataaaatcattcaaattagagctggatgaagtttactttggggctgtttatcttccaactgcattaaaggtactgaggatgtaagtgggactcagtggaaatgtcaccagttgtgttgcatcgaaggctaacatccttagcctgctgttgccaggggccttgatgagcactgtgaaaatgtacaatggcagatttgccacctatatgtgtgtggggccaagagacaggggaaccatcagcaagaatacactactgagcatcagtcagaaaatgtttcctggccgggcgcggtggctcacgcctgtcatcccagcacttcgggaggccgaggagggtgaatcacctgaggtcaggagttcgagaccagcctggacaacatggtgaaaccctgtctctactaaaaatacaaaaattagccaggcgtggtggtgggcgcctgtaatcccagctactagggagactgaggcaggagaatcgcttgaacctgggaggtggagtttgcagtgagccgagatcgagaccgtgccactgcactccagcctgggtgacagagcaatatccatcccaaaaaaaaaaaaaaaaaaaaaaaaaaaaaaaaaaagagagagagagagaaaagaaaagaaaatgtttccttacttttggcttcaaaccattttgctggaatgttatttaatgctatatgctcctgaagcagctacattaaatacttcttttggattcccaacaataagcaggtctttaacaaaactttgaaactgaatcagttcaaaacacacttcctagtcttataaatcaagccttgtgctctcaatatcatcctcatctttttcatattcctttagagccttttttcaaaatttaatgtcaagtatcagagttgtaggaatagggtcttgagtgagaaaattttgattctaaatgctgtgaagaattctaagttacccacatctgtcttcttttgggacagcatgcatggtttgccaaaaacaaaagatcctcgtaaagtggtagtaggtagttggttcttttaagtaggtagacaggtagtttgttacaggccctgctagggtggtgggaacctaagaacctgaattcggatttaaaagtttgggttttgtctgctaaagaaaagccacttgaaggcaaggtgacattggcaaagaggggatgaagaaaagtgacctgggaacaatgtgcagaggacagagaaggtagataatcggtaagtaggtagggcacaaaataatgtgggtccacacctgggtgataacagggtagccatattgtaggtcaactcacaggctttgagtaacaaccatgcacagaatcagcttgattttatgtggttggtttttttcctggagtctcttctgcccacagctgggctcttggtcaacacgttttttattttataaatgaaaccctctgtatatttttaaggcatagttcctctgtaactgtcctccgtggagccactggatcctatttttaagaatgagaaggcaataatgtacaaaaactaccattaaccacgagaatctttaccaggggatgctcctgagaagcctttcatggttttgttatctagacacctgcctgtttattagacatttcatgaactgacttaataactatttcatagagtatgaaaatgatatttttactcaagagaacaacatcaccagttccaattcattatgaaactgcctcagttgaggagaaaaaaagcaggttattaacaggtcagaaatctgggcagcccagcccccacctcattgcttgaaaagatcaccacaccaaacaggtccctgcttattgggcctcttcattggcatcttcctttcttggctgcaactggagatgagtcaacaagatgcaagcaacactccccatctctgccacatgtttaagaaaaccatctgacaggttctcactcacccatcccacaggtgattgccgaaaggacctaacaaacatcacacatctgttcagtgccccctggcactctgcatcagagatggtctcctttttttttttttcttttgagatagagtctcactttgttgcccaggttgaagtgcagtggcgcaatctcggctcactgcaacctccgcctcctggcatcaagtgattctcctgcctcagcctcccaagaacctgggattaaaggcatgtgccaccatgcccagctaatttttgtatttttagtagagtcggggttttatcctgttggccaggctggtctcgaattcctgccctcaggtaatcagcctgcctcggcctcccaaaatgctgggattacaggcgtgagccaccgcgcccggccgagatggtcacttttaatcctcacaacaatcctgcaagattagtattttcatcttcattttacagaagagcaaacaggttttaagaggtcaagtaaatttcccaaggccatgcagctaataaaacaatggagacagaattctaacccaagtctatttgatttcagattgtcttttctgctacgtgcacaacatgcagcttgcatggcttaagtacaaattgctcaagaatggtggttactgttccataataggtacttaatgaattatggcaatgtgcattcatggactaatatatttggtgcacctagtctatgacaagtattatgttagatgctaagaatgtaatataagcaacaaataaaccatggccttaggagcgtacagacaagtaaacaggaaattacagtgagggatgggacagaattaagtaccaatgtgtagggggaggggaatagcagcagggaaggcttcctgcaggaagcagactaaggtaataactgttaagattgagtaagatttgccctgaaacatttgatgaagggccacatgagcaaaagaagaggaagataatccatccaaaggtaaaaaagaacatatacagctatgtaaggaggaataagaaagattcagggaggtgttatagagagagaaagacggtgttgtttggaggtgacaagcaggaggaaaaggtatgcccttgggcaatgaggatggtaggagtggagggtaagtagtaaaacttcaagccggagggcagggtaagaccacagtgtagagagccatgcaggccaagcaggaatctggcctcaggagagagccactagaggccatgctagaggcctgggacatggtgaagcaatgccttcaagaaagactcatttgatggtgctgagtaggacagacagggcagggcaagaaggcgaggaggctgacacaggtcaggaggagagctttgctgagccacattgggaaaaatcagtaatactgatcttgactttatttaaaattttgatttttttcataataatgtttgcattaattctgatttttcaaagatattacattaagatattattcaacttgattactgagtttgggggcaccccatgtggatgcctcactcacctcactgtagtccagttctgaagaaagagttgggccatgggtgtcgaggggaagaggaaataagaaatattggatgtgttttaaaggaaaaatcgacatgattttatgactgattggtcataggagatgaagagagggaaatccaagatgccacttagattgcttatgtttatgcagtgaaaatggtgaatctacgggacggacataaataaggagagtggaagacaatgttgcctttggttgagttcagatggagtgagggcaacttggtggagggtctctaaggtgaatgcatgatgggagaaggcaggaaagagtcaagctagacctagcagcaaaaaggatggaggtagagcacaactcaaggaaaatggcagtcaggacaataagggaaagaattgaaagtggatctgtaaagctgctgacagttaagaggagaaacaagggagaaaaagcacaaagaagtactggttgaagacgtaggaggaaaaacaagcaagtatacaggatcatggaagccaagagcagagctttaagcaccaggggtggtgaacaagaggccactaagaaaagggtggtcttggccggacgcggtggctcacgcctataatcccagcactttgggaggccgggaggccaaggcgggcagatcacaaggtcaggagttcaagaccagcctggccaacaagttgaaaccccggctctattaaaaatataaaaattagccaggcgtggtggtaggcacctgtaatcccagttactctggaggctgaggcaggagaatcatttgaacccgggagacagaggttgcagtgagccgagatcgtgccattgcactccagcctgggtgacagtgtgagactccatctcaaaaaagaaaaaagaaaataaaagagtggtccccaggcagccatggaggaagggattcccctgggcatcttaggaaaacacacacctcttctctgctcgtcatatgcagtggtgagccgtggaggaaacagcatggctctccctgtcctcttagaaagaggctaccagaggacatgagcccacagcctgaatgctccacccatctaatcctgggaatgaaatgaagccccggaagcctggaaactagttggacaatggacacaccttggtcctgctctgctctgaggtgagccagccctaaagccaccacctgggccgaccaccaccaccattcctgcaaggaagcactcattggtttgtgacccttccctagcaccacttcccagtgcttcaaagtcaggaacttggatcttgctagcccattccctcctccactgcccacagtcatctccctggaactgcctattcacctgtcccctccagccagccacatcttaaagccattccttttgctcatagctttccctgtctccatgccccaaagtccccaaaaattgaaaaaaaaaaaaaaagaataggagaatatatttttacaacagaaaatcatgaacatgaggagtctgtgtctgtggagtgggtgatctattctttcggtcttctgtctttagcagaacagtcttcaatgtccacatgcgatgagtaactccctagttgctcaccttctgtatgtgttacttggagcctaaactccataggagcaaatctgtcttgtctttgcttgacttcagaatcctagggtttagccttagtacagggtcataaacatgtaagacactatacatatttctagatgctagtgctttctaaaaatattttaaacccagaagcaaggctgagtcaacactgggtggatgggcactatgatttgccaccatggaaataactttgtattatttttctaggaatgtcatagatgctcatgcactttagcagaaagacacaagactagaaatcaagcagcctgggttcaagtcctgctgtacatctaaggagctgtgtaacctctgggctattccttaacctctctgaacctttgcttcctgaggagttcggcctccatgatctccaagttccttgccaactctgtgtcatttttgctgatccatccacattctttctcctgaccttacgactgacaaccttcattggataaacagccacaccacggtgggcgagcctgcagagccaaaagttatcggaggtataatgtgggtctgtgacatacaatgtgcccttgaactgcatgaaaggtcttacattgtttgtcttcattctctcccgaagccctgctccaacagttttgtcaccatctgccccacatttcagtagagaacagtgaagctcagtaagagtcttgctactgaacagttataggggctctcacctggcaggtgctcaattaaagtgtgtgcaatacctaggccatttctctgcttaaacccttcctcctggttgcatgtagttgcccttgtgcgactccatgcacttctgataaagtctggacttcctcatcctcagaagacgctttagcacctccgtaccctcccaaccaccctacggataggctgtttggcaatggtgaggaacagttttggtcagaggtatttggcctcagaaggacatgggcaagggcgtggtttctggggcacatctgttcagagggcacgtttgttctgctcccttgagaggtaaaagggaaggaggcaaacagaaccactccccagctctccggagtttgctgatcaagcctgagggtggtgagggggtgcagccaccaggagaagcaggaacaggcaaaataggaaactctcaaagggcaatttaattttagactcaaggccaggaaattctttttaaaacaataagagtaatgggcttgggccttggtgaaagtgcaggcctgacacgctgcaggtttctgcagaaaaaattctgaagcacagagggttgtagagaaggggatgtctaattatgctcttaatgcaaagctgtgcttagcttccctagggaccccctggggaagcacacaaagtcggaggtagtgcagccaacaccaacactacaactcataccagcctgagaccaggacagcctccactcacagccaacactcgctgaaacaggctgaaggacggggagggggtggaacttgagaccacagtcctggggacctgcagttgacactctcttgctgagaggtcttaggtgagagacattttatttgtaagcttctagatctgcaggtttcaagttgcccctcgcttagcatgaagccttcagaagcccagtggtaccatgggtgacagctttaggcatcttgtggtatggagatggagactgaggctgactcaaaacctggttatggacacggttggtggaacttgccatggccagaagactatccagtaatttcaatttgctcagcaatctacacaatggagtttgggttttttgtttttttttgttttttccagaatcaggaaaaactaatttttcataaacaaggcatacaaatacatgaatgaaaatacattataagttcttacatatcaccaaatatcaaataaataaataaataaataaataaataaaataaatgtgtttgtaaggagttgttatggatgtgttcccccaaatttagaagttgaaatgtaaaacaccaatgtgataatattaacaggcggaggcattatgaggtgagtaagttgtcagggcaaagccctcaaggatgggactaggaccctttaaaaggacctgaaggaatgggtttggcctcttccctcccttccgccactgaggacacagcgttcatcccctctagagaatgcagcaggaagggtccatcttggaagctgagacgggactctcaccagacacagagactgccaatgccttgatcttgaacattccagcatccagaacggtgagcaataaatttctattctttttgaattacccagtctcaggtattttgttatagcagcactaatggaccaagacaggagtgctataacaaaatacctgaggaaactccagtaattcatttaacctcttaggatctgaatttcctgatattgcaagatggtctttacattgtggtctgactctgaaattctctagcttgtgatgattgaacctagtagcttacagaagccccacagtccaagatgctggaaaaatataggttattttcttctttccttcaatttctgtgacaaccactaagagttatgagcataaataatttccctaaacattatgtttcagcagtctcattcccactttggttttaaatttctttttgtggattcccacttctctagtaccaaataatttgtccattgctctccaggattcccagagagaaggaaagggtgtcttcactaggcttcatggtagcaagcacaatcactgcataagaagtgcagggacagcagagtgacccttctgtgaacacatccaatgactggagtccggaggcctatgggctggaagtgagtgtgccaacaaccagagccctgggtaagaagggaactgcatcgcaaggaggcccaattaaactgcaattactcaagataagaaaacgaggtctgtttacacaatggggttgtaaaccaccggctgtgacaagagaactttgatctggtggcaagggagctgtttctcatgcagggcagtgatgaaacaaggaggtttcccaatgaggatgtctccatcttcaccccagtagccccatcttcttctggtagcacccttgcatggacaagcggaaatcctcaccccttcccagccccagtatccacctaacacaatcaaaaagtgaagaatagaaagagatgagatagtgactaaaaggaaaagagaattgatggaggtcatctttgtggaggcgcttgacaagcatgttctcactgaaccgtcacagtgaccttccacgtaccttataccatgcctattttacagatgaagacactgaggttcagaggaggtaagtaatttgcccaagatcaaatagctaaagagtaccagacagggccgggcgcagtggctcacacctgtaatcccagcactttgggaggctaaggtgggcagatcacgaggtcaggagatcgagaccatcctggctaacacagtgaaaccccgtctctactaaaaatacaaaaaattagctgggcacggtggtgggcgcctgtagtcccagctactcaggaggctgaggcaggagaatggcgtgaatctggggggcagagcctgctgtgagccgagagggcgccactgcactccagcctgggcgacagagcaagacaccgtctcaaaaaaaaaaaaaaaagagtaccagagtaccagacagaatttactccaggtctttctgattctaaaacccaagtgctttccactagaatttggctgggacccattccacagctgcctggaccaggagtaaaggctctatctcatgtctggtgtcaagaagacagtgtaaggtgcgttggcttctgcctcaccagagggcctgaaggtggaaatagagtcctgtggatcaatcaaccagtcgatcaatcaattacggaaggaagaaagaaaatgtacaaaagaggaattgcccaaaaggttttgtgacagggagctgctctgagggccgtggttaatttggagctctttttctgcaatgcacttagctaagcctcatggcaggactaccctctatgctggtaccaactagagattcagctgaccccccaggtacccatgtcccactggaactgcacaggagggacggaggccaatgcccagagctggcaatgactgacagcctccctggggtccctcccaaggtgacatccagcatgaactcaggcttatttccagtgccctgttcattcagtgctcgtacgtctgcaatacccttgatttcacaatattttattctgtatagtgaaagaaattaagtgtctaataaatgggatccaatttatacaacattgaaggctttcatggcataaattcacaagtcaaaaaacagtcttttgttggacagtttctgaacccctgttttcattgaaacaacatagggaccatgttttaagagaatcacatttgatttagggagagtgaaagagtggcaagttttttgttttttgggttttgtttttgtttttgtttttgtttttgtttttgttttgagacagagtctcactctgttgctcaggctggagtgcagtggcatgctcttgcctcactgcaacctctgcctcctgggttcaagcgattctcctgtctcagcctcctgcatagctggaattacaggcgtccaataccacacccggctaattttttgtatttttagtagagacggggttttatcatgttggccaggctggtctcgaactcctgacctcaggtaatccacctgtctcggcctcctaaagtgctgggattacaggtgtgaaccaccgcggccagccaagagtgaggagtttttaatacagttacttcaccctcaaattaccaggaatgtcccttaagcccagagtcttatcataggaaattctggcacttggggatatgtagttagcctcttgggcataggtgccttccctgaggtggagcacagtgggccactcctgcccgagcatgttgttctatctcccaaagtctgtggctctgggaggaggtgagtgggcagttcctttcctctgtacagcccaaggtgtttcctaaagcccgcatggccaaaggggtcactagtcccccaggaactcctccgcacatcctccttgccggtgagacatcccaggctgggccatgtttagtcaaaactgagagcagcccagcccgctcattcccgccactctcagctgggccagcacagtgctgtgaaggggagaatgacgcatgagaggacaaaagtactgggcttgcaagggacttccaggctcacagcgggcttgggcttgcagaggcagcataacaggaaggagcacttcctccccatggatgaaagggtccctgacacacagcccatagaagtacctggaaaggtcatccctcccacacaatgaccagacaacttcccaaagtgttgcttctccacctccccactgtgacaccacctcattcattatggcctcctgaagggctgaccttacgcatggggaaaccatgagtcctgcttttgagaaactgacgctgaggcagagaatgtgaattctgtgcaaaaccatgattacctgaggctggcatggattttaaccactgtggctcccatggtttccaggcattcttccgcagcaaatgaccagataacgttaatgtgacctctaatttacaagcaaggactccgagacttagctatcttcaggcgcagaaaatactgacatcctattttcgaagagattgtttcttggccaactaatgcagcatgctaagtaagagcccctcggagcaggaacacagtcttactttcttttgttagatttccctttctaaagcaataatttactagtaaccaagacctgcttagagcagtctgtacacacagtcccattctgctttcaagtttgatctgtggctactctagaccaggtttctcaacgtcagcactatcagaatttggggatggataattgtttgtcataggaggctgtctggtgtactaaaagatgttcagttacatccctggcttctactctgatgccaggagcacctcctaaattttaacaatgagacacatctccaggcattgccaaatatccctttgggggacaaaagcaccccctactgaaaaccccaatactctcatggttttcttttcactctgaatttaccatacatgggacagagtttcttcttttttttttttttttttttttttggtgtgtcagactaactaaatcagagactagggcaccaggtaggaggacttggattattggattaagcaccacgggttgagctctggacagggaggctccaacagaaccgagaagactctggttgcctggggctctgactttcttatctaggaaagttaatgaagctatgcttacccctccagggtatcttagattgcaactgaatgtgaggtttgtttgctggtgtctctagtgccaatgtcctaaggttatattttgtagacaatttacagattctctgtttatcacagcccagtctaaagttagaggttatggtttgagttggtttactaaacttgagtttataccaataagtgttatttacttcttaatttttattagagaaagagtatgtgaaaaaattaaagggcttctttgcttgctctggaaggttgcctaaatcgtttcagggacagagaaactgaggcccagagagaagttaggagtgaaagtgcaagaacaataattcagcagctcttttgtacaaccttctgcttttacccaagcaactttgaactttttagtgaaaaggatctcacatgttaatgtttttcagataaggctgtcatgggtgggagtaaacggattatttggtttgaaaccaatggaagccattcaaaatttatttaaaatatccagggtgttcaattgcagggaggtgtctttagttgaaattatgcacttagagttatttggtttgggatttttttattctcccacaattttgagataccctgcctaggatgacattatattatatctgcaacttttatacttataataggctttttatctcagtgtctaaactaagtacatatttgtgtgacatttctttctttctttctttttcttttccttttttttttttttttagatggagtcttgctctgtcacccaggctggagtgtgcaatggcacaatttcagctcactgcaacctccacctcctgggttcaagcgattctcatgccacagcctcctgagtagctgggattacaaggcatgtgccaccacacctggctaattttttttgtatttttagcagagactgggtttcatcatgttggccaggctggtctcaaactcctgacctcaactgatccgcccgcctcagcctcccaaagtgccaggattacaggtgtgagccactgagcccagccatggcatttcattcttagccaaaatattaatctgttttaatttgattatagtacctgtaaatagaattaacatggactggcttttaaatcttatttttcaagtcaatgacacattttgctctgaaatcacaatatcattatttattttaacaaatttctacaatatcgtctttaaggaaattttaatgtcatttgtgttaactttaaataatgacctctatgtgaggaaaaggaggaggagcccttttctggcaacttcttcagccctcgatatgatcttaaactgcaagtcctttggcaatcgctactaagcaaactcgagtgactccttgcctggacttgtcgtgtagtggagtgttggggagtgggcagtttaaacatatttctgatatatattatcgtctaaacctttttctgattctaattttttgtaaaagtaaacggtgcttacatgaacacagaagccattttaaaaagaagaaaaatgtggtaaaaacagctactgaagagagatgtctcaatcatccttaaaatgtgtcttttcccttgaacagaatagctactgagagtttttggttttttttaatgctaaaaaaagaacttcaggctgggcgcggtggctcacgcttgtaatcccagcactttgggaggccgaggcgggcggatcacgaggtcaggagatcgagaccacggtgaaaccctgtctctactaaaaatataaaaaattagccaggcgtggtggcgggcgcctgtagtcccagctactctgagaggctgaggcaggagaatggcgtgaacccgggaggctgagcttgcagggagctaagatcgcaccacagcactccagcctgggtgacagagcgagactccgtccagcctgggcgacagagcgagactccgtccagcctgggcgacagagcgagactccgtccagcctgggcgacagagcaagactccgtcaaaaaaaaaaaaaaaaaaaaaaaaaaaaaaaaaaaaaaaaaacttcaaacaattcaggtcttttaatatacaattacagtgagaggtcacagttaactgtgtcatacttaactttaatcagtgttaaaaactatacagaatctctggcaagacagtcaaagacaagtcagaaatgcgttcttgtttattggtgttaattcagatccataaatgtactgggaaaagttaataataataataatataataaacttatttgcgactgggctcagtgcttcacgcctgtaatcccagcactttgggaggcagaggtggatggatcacccgaggtcaggagtttgagaccagcctggccaacatggtgaaactctgtctctactaaaaatacaaaaaattagttgggcgtggtggtgggcacctgtaatcccagccactcgggaggctgaggcaggagaatcgcttgaacacgggaggcacaggttgcagtgagcagagatcaaaccactgcactccagcctgggcaacagagcgagaccatctcaaagaaagatcacttgaggtcatgagttcgagaccagcctggccaacatggtgaaaccccttctctactaaaaatacaaaaattagccaggcgtggtggtgcaggtctgtaatcccagctacttgggaggctaaggcaggagaattgcttgaacccagaagatagaggttggagtgagccaagattgtgccactgcactccagcctgagtgacagaaaaaaaaaaaagaaaaagaaaaaaataaataaaataaacttatctgtccgtatttcactgtaagaaaaaaaaaattcaacatttatgatggctatctttgaataaaaacgtaacagaatttagaaagaataattaatgacacagctgctgatattagtgtcttttaatactggaactgatcaatatcaacattataagatcctcacgcaatacatttttgagaaatttgtcaaagcatttctattgatcagcatatagcttgggcaaggatcttctcacctatggacaaaaaacttcatccagtcctattttaaagtttctttgtcccctcttattctaggatttatgaaatttttccataaacttattgtcatattccattttcacttttaaagtctgtgattagaaaacttgcattattggctttttatgtctgaggccaaaagtaagttcaattataatatgtataggaataaggtacctcaatatgtaaaaaatcatcaaatgaactgggcagtgaaaatcaactggctttaactgttcatcatatttgagtcatttctctcaaactcaaacatactaaaacttcttcagcaaatccatcagtatttggttttcttttatatgctgataaaatcatagataatcttacaattgacatcctccaaaagattcaaagctgattcgaaccttggagttcaggttcctggcttctctgtctactgggggtcaggatacaggaagcacaaggaggaggggagaagattgtgtgggcaaaggggcagggaaggggccaccactcaccaccactgcaggacgaggcgctgagtaagggacggggctgctcccagcagaatccacaaagtagctcattctgctctcagcacctgtgtgagagaaggcgttggctgagcctctggatgctcacaggtttgtggattagaatacacaaggaagacacgaaccttagaactaaaagtctccttaggagccaaccagttcacttctttgcatggcagggaaagcaatggaaattcagaaagatcagtgactaacccccagcaccggtaagagcagacctcagacagaaccagttccctggttgcaaggtaacatggataacagaccatgtctacacactgcagacagcaagcagtaaaccagtgcacaagaggcacatttttgtagggtttctgagcaggaaccagttcttgtgtgtctcccccacccacaaccaggcctggcagataagtaggcatacaatacacagttggggtgtaaattaattgataaaggaataaacatagaaaggattggagaaaggaaggatggaaaaagctctcctgaagaggtatgtcacccagtaacccaagaaacagataaacagagagaaaccctgcaaaagggattgagcattattgatcttgaaaaaaggagaagggctattaaataacttgttgagagctattttctacattggaagtctgagtgtctagaatgcttgagcaattttctggctgaagggattttccagttagctactggtcatcattacatatcgaacatctctgttgacctaaatactttcgaaagttcattacacactttcataaacttaatactatgcatttaaaaagtcgttcttgaataatctcgaagattaaattcctaggcataccaatcagaggccaaattcttattgttaggaagtgacgctttaacttcactgctttccagtttgtatttgtctgcccttttccttaattctacatttaaagcaactgatacatttcaagaaaaatcaagtaataagaaatgtcttatgttcaatttgcagtttggttcaccatcttgatcccttttttcatatgaaatgtatttaaatgtttaaatgatatagttaaacaggcttggcaatataaaactatactgcctaagggctacaacaacaaagctactaatatcatatggttaagggatgtaagctacaaacctcctgaagtcataacttatcctagaactatactttgtgtttttaactaaaactttgcctttttcttatgtcttttcttccagatgtagaatgcagtcaaaataacattagttttaaaaaattaactaagggtctgaatagctagactatgttaatcaagattttgtcctttagttttttaggaaattgatctccactacagcaaaaccaccccaggaagagctcctcattggtgaagatgaatggtaggaaaagctcaaagtaccctaggccagggacattgttaacatctgcgtcaggggtcactactcagtgtttgtttccaagaacagtgagtacctatgatgggtctgactctgtaccaggcactgagcatgaaataagagtaagatgcatgtcacgtggtttagatatgcctgtcctgaccatacactgtgaggatcatctcactgagctccatggctcctttcccaccaaagtgttcctcgtttttactcttagaatcaagttttaaagtcctgatgaatcatcatcaaaccatatatcccacttcaaagtttttgatctactttgagatctttggttgagacataaaagttaacaacattgattgtgtcatatgataatggcttaaccacaatcaaattccctagggaaatgttgatcatccctccagggtcctgcagggcaactaataccttctagaaatgaatactttttggaattccccccagtgatgtgggaatgctgtttcatgtaaacattcaaccctctgatttcctccaaaaaaagccccaaggatctcctgagtcctcacagacctcagttacagtagtctccccttacccaaataggatttgttccaaaaccctccagtggaggcctgaaacctcagatagtacagaaccccatacatactatgtgttttcctatacatacacacctatgataaagtttaacttatacattagacgcagtaagagattaacaacaataactaatacatgactagaacaattataacaatatactgtgataaaagttattgaatgtggtttctctctctctctctctctcaaaatatcttactgtactgtactcacctattttcagaccttggttgacggagagtaactgaaacctcggaaggcaaaaccacagttaagggagtacgattgtatttatccaacaatcatgtaataggcgtcctttgttagtggcttgtttattcatttggtaaataatcactatgcaccactatgtgccagacacggtcctgggcacttgaaacacaccagtaaacaaggattcctgacctcacggcccttagattctatcagactcaggaaaaatctgagaaagacaggatctctatcttcaggcagtggaatcgacaggctcacacataactatagcataatgtgataagtagttggccaacaatatggaaaaagaaataggaagcagtcagttctgctgggtgcagggaataggaaattgtgaaagattgcatagagcaaggtgtaaccacatggccctataaatcatccctagagtcccacaagtggcaaaggaccttcacctttcaaatgcctattttacttacgtatttctaagagaaaggacttttggaattggcagccacatcctgaagcccacctcaaagataccaagggtttctgtctgctggccagacaacactccccctcatagcaacactcctggaaaaggggtcagtggaaatatgttttctcttctcattgacagagtgagagaagaaagctctggcccaacatctggtgcactctgtgctggactgtattcttgaagctatgactgtatgaatgacacttcccttggggaaaagccctttgcccagagaggaaactgacaagagggagttgccagggctctcaagggctctcgtctcaggaaataactcttggacagaaatggattgctgctttattatttttttggagaaagaaaaaaagaacccgccctttttccacttgtagattgtgacacagaacagctgctagagacgtaaaccttctcagaagaagtaaatgaagtgtttaggtagtttttttagtagcgtttgttttttcttttcttttttggctttttggcaaaagagaattccctcccacaagacaactgcttgaacatcagctgcaccaacttttttcttagcattgcacacgtttattgcataaatacaagcaattgtggcatctgaagatttactccccagcgaagaagcatccatgagacctgtttgggtgcaaaaatgatttggacgctgggtaacagagggtcttgcagagctgagtttatttttcttgaaaaggacctgcgccacctgagccgcaggataagtgggtcagaaaggaggctgccctgctctggactgtggcttgctgtgcccccccatgctccctcccacctctccagccccctctcgccgtgacccctgcaccctccactgcaacatggaactctgttgttttcttaggcacgcgttgccaggtctcactcccctgcccttctcatgttaccccctctgctaggaatgcccatccaccctcaagatgagtgaaccctgcctcctcagggttttaggctcagctcagaggttattgcagcctggaatccttcctgagccacgcttcaccccagccagggttagcggctccttgtttatgttcccaaagtgtatttctatcacggtgcttatcacattgttttattaccatctgcttctgtttgtctctccagctaaattctcatctacttgaaggcaggcaccatgcctttttcatttttgtcttcagcacttaagacagaccatggggcataatggaaactcattgtttttttaaatcagtgaatgagtaaatgaatgaattggtctcacaagactaaaaatgtaagaggtagatcagatgtgaatatatttgttcctcaaaatagagaatctgaatagattgcaggtctagataaagaaccacttgaaataatcagtttgtttcatgatccatttctaagggaaaaccgtttccttctattcacatagctatttaatgccccctcatctaagaaggcttttcccatcaccgcatatgaatagcagcgcctttctccgtactctgacacctaggtgtttgttcgttgtcttctccaaagtccactctgttagaatttaagctccccaagggggagatttagttcatttattcactccagatccctggatcctaggccagtattggaaagtagctggcacatagataactgttaaatacaatagtgtaagttagaaaacttgtacacactttttcagtgtaaacccctctttttacaaatgaggagaaagactaaggcgatgctgctaattggccaagctgagaccagactcctggtcttcagcctcctcctgtgcttagagaagatgcttctctagacctttgttacccagcgtccaaatcatttttgcacccaaacaggtctcatggatgctgcttagctggggagtaaatcttcagatgccacagttgctttgcatttatgcaataaacgtgtgcaatgctaagaaaaaaattggtgcagctgatgttcaagcagttgtcacgtgggagggaattctcttctgccaaaaagccaaaaaaaaaaaaaagagagagagagagaagatgcttctctaagcaccctcatcaccctggatggcgaggacagaaacaagcatgagatggagaagacaaaaaagtcaacactttggcttatgtgggtgtctcatgtccaaaaaatcactttaaaactatggttctgcttgattctagagagttctattcttcatagagcgagtgaccacttctccaacttcccaccctccccaaactggcaacccggccaggacctgtaggctctcacttcctttcacccaaagcttgccagggcagggcagggcaggttgagagacacagaataaaggaaaaattagggaggagagggactgttcaggccaaggcagcagaagaacaagaaatcccaaagagaccaggcttgaatcaaggctgaatccagttcacatcaactctgaccctgcttggctgtatttctagataactttgacatcagttaagcctttttcatttggggttatgtattcctaaaagaaaaactacgcttttaggtaaataccaagtaaattacactttaatttttttcttttgaaaacaaaattcttttgaaatcagcagtttttgccaaactaatacaatgttaccgcaaaaattaaaatacaaaaaagtaacagatggatattagaatcacctgaaacctcaccatgtagagataattatactaataatttgttcaatattcttctgggtattttttaatctatctaaacgaacatagatgtcacacacacacacgtgattacaattttaccttcatgagattattctccacatgttcttttgtaacctgctttgttcactgacatttaacataatgctatggacatttttctctgttgataaatgtggctgtctatcctaaagatgatgactgccaagtattctattgtatgtatatatcatacttttaaagagcctcttattatcgtataattaatttgtccccaattctttgtcattataaaaattcctaaaatattttacattcccactaaatgccgaaaaagagcattttggggacaaagaaaatatgcattccatatttgaatacatattgactaactgcattctataatagaccagccaaaattagactcccactgacaaaggcatcatgttttaaatttcaacttgccctctcgtcttcatgttagcttcataggcaatgaattatggttaaaacatatcctgggtatgaagatggcacatggggaattcaaaagcacaataaagctgtggcagaaaatgtagatttctccccaccacccctcaccccagcctttcctctttgaaaacaatgcaaaatttgaatagatttccaatgagcatttatcctaatgtcaataatttaggattcctatcaattcaaacaaaaagcatgtccttttggcttggaatacaggagacaaagaatttggcttccagggctgggctcggtggctcacgcctgtaattccagcaatttgagaggccgaggcaggcggaccacccaaggtcaggagttcaagagcagcctgacaaacatagtgaaattccatctctactaaaaatacaaaattagccaggtgtggtggtacatgcctgtaatcccagctacttgggaggctgaggcagaagaatcgcttgagcctgggaggcagaggttgcagtgagccgagatctcgccattacactcccacccggcaacaagagcaaaactccattgaaaaaaaaaaaaaaaaaagaatttggtgtccaaaacaactaaccatgtaaaaaaaacttgctccaaacaacagcacttttgccaaactaaaggcaacacctgggctaccaaggcaacatctttaatctacaatgtatagagttttaatttcttttttctgaatactatagaaatgtatttttgaagactcagagtatctcctctttcaggaagctttcccctcccccctaccctctttggcaattgcatggacctccttgatgcccctccatgggatttactgtaacggtgtaacaaagttcatgacacttcctgtatctatgcctgtttctgctcctgaatgatgagtaacttgagagtaaggatggtgtcttttcagatgacacatagtagccatgcaacaagtgtctgtttactaaatgagggaaagtacctaaagtacttgaaacagagttggtgtgtacaatccttgtgcgtcctgagcttatccaagagagtaagttatcgtttggacattaaaaaaaaaaaaaaaaaaaaaaaaaatccctgtgatgaagtgtgtccttgtgtgaccctgaggttaggcttctcaagagttaactacaagcaagatggcacttttctctaaactataggatgtaccagattgatgagttcatctatactccttcagtgtgttctttctgattctcatgagtagcccacgtgtatttcccaaatcatttgagtagatgtcttccctgacctgtcactgtaacaaaagctcccaaatccaattctctaagaactcaggtttaagatccatcatatctaggaaagctgaacattccttactccccatggaaactttgtggttacaacgcatagaaaagaaaaaggattagaagaactgaagatggtttttctgtctcactactaaatctacaagaacctcatttgcttgactaagtaatccaacattacagtagtagtgaatattccttcttattttaagtagccagcactgacaaatgaaggctgtgttccaaattatgggctactgtcttctgtgtcttaagctaagtgcatttattctttcactaaggttacagagcagcaactcacagtacaattaacatctcagtctttgtttcttcacaacttcactataattattccgccaacccttgcttaaatggaaatgagtcatatccatctcctatttctctaaaaataaacccatctcctaattaagcataacactttcaagtcctgtatgaattgacatagctcaacgaatccttcttagaatattaaaatgaactcatgtcattataattttaaagagtatattgttttacccttccttgaggagtaactcgctactatctcctgaaaaagagaaagactagaagatgttttactctggtataccatagcagttaagaaataaggaatgcttcatagattattttatgcatttccttctcagtggaaacaaatccctcaccatacagtactgaaatggcattgtcaacaatggacagaaaggtcttgcttctcctaggcatcaaggaaatacattaaaacctgccgactcttaggtctaggaatctaactaagaaaatgccaattctagtctctgaaacctttgaaatactaacaatctacactttctagtcaatcatacttctgtcagaacatcttcctgaagatcaaaggtaatattcaatacactgccttaccataaaagtggccatagcctgtgtacaaatgctatgcctcaaatcctgtattttaccatgaaattcaacaaatgatcacacttggccttaggatgtactcctgagccagaagcatggtaagtactcataaataactgaataaataaataaggattgtgttttacttcgaacctcaaaacaaaaaaagaataagctggaggaataatgtagagtactctttgctttccaagaatggtcgtaatagaggccatggaataagagattgttttccaagtcaaatgcaaagaagggccacgagattaaaaacgtcaactctaatccaatgaatgctgccaatgaaacctctgaagagactagcattttaaagaattacattacagactcttagcctgtgaagcatgtcagacataatctagagtttagacttggctctggctctaaaggaattctcaacaaaactgagaggcaccataaatagaaagagatattacaagaacaatgagaggggactggatagttgcaataatgcccctttaaaattgaactaaaagataccagctgccttagatctctcaaatccagcaagcaacttcttggactatgtctgattgtgattttcatggtggagtttcatttgttttattacccgaaatgtaaggttccaatttctcagtataatgctaaacagcttgctagcattcttatataaagagggattgtgcaattccagtgaattttggagttggaaaaaattcatcaatcttctcatttatttcaatgaactgagtcctaagaggttacgtgtttagcagtgatcaagaaccctggagttacatactatgggtgaacgtagaactgcttgctgcgtgtatggccatgagcaaatttcttaacctcacaatcagtttcctcaactataaaatgcaggtaataatatcaacactttcaggattatagaggaggatcatacaaaacacaaatacttagcagcatgctgtataaatagtaaaaatggtcaataaataataattgttattattgctattttatcagtagtgcctggcaattagtaagcattagtaaatgcttactaatgtcactaattagtaacactactgttttatattaattacttttttctactgcccaacatggcagaggttatttaagtgttagagctagaacatggatagctaaatctctcatctctttttctaaagacttgtattcaagtcatgaaaacaggattccctttcataatcataggttgagtagcattagtcaagaattttgcaggagaaaagagccacaatttctgtttaatggtagtctgtttgtaccattgttatgcataaaaccaagaagtaagcatttttcttacagtggagaactaactcattgaaagattgcatagcacaaatggtgaaatattgcagcttcctgagttaaaccaacatctttttgatataatgtcgatcttttgtggacttacgctttagcaactagatacaaatataaggaagtagtaaagcactgcggaaaatagtgcaagatttcttgtttgttcatttttttcatttttgctttttcatttgtttttgctttttctttagagcagtgcctcccaaactgtaatgtgcatatgaatcacccggggatcctgttacaatgcagtctgctgcagtaggtctgaggtctggccagacattccacatttctaacaagctcccacgtggtgctgatgccgcaggtcagaggacttcactgtgagtagcaaggcagcgctggactaacttggttgaactcatgagtgattataacaaggtaggtgtttaggaggcagagcccaaggaggaacaggcaagacttctgtgccaaggctgagcagatgctggtaacctcaggtgcaatacaaacccggctggggagaattgagtagctcaggacctgtcagtgtctcaggagccatatgccagatgcacatctgccaagacttcttgcttttcctaagaagacatggttctagttatttggtcccttttatcaagaaactggcaatggtgctttctcccatcaacagaagtcatttggattaaggattacaagaggtgccaagagataatttaaaagagttatttgcattatatgtttttttttacaattgtaaaagactcacatgttttggaaactttttgtacattgttttgcaaacttttatgcatctggaattatttcaaagtgaaaagttttttttaagtctctaaaaagactaaatctcttttaaatctctaaaaagaccaaaattctggagttttctacctttccacatctcttgaaaatttatatattttttcctccccattgagaatattttcctgacatttgcactaaatgtttgttgcttactctcatgctagtaagtactacccagcctgttccctctaagttctgaaggcagctccaacacttgattactggaatatgaaatctatcctcttttgaaaaaaaggcagatcagaaacatccttccctcactgctctagataccatttttttctacctgaactcccaaagcatgtataggttatactacactacttaataattatattgtctttcatttttatcctcttttctagtaaagattattgtgttaattttaaaaatggagtttacatattgtttcttctgtgtttggtatggtctccagcacaaggctgggcatggagtagaaataaaactgatatttgtcagggaagggactgacttacttacccaggaaactaggcctgggtagtctttcttcaaagtcagtatcttcataacaatgaataagtaatccacagataccacttcagaaaacaggcttaatccagtgttctcctagataagcaaatcagtctaagcagaaaaatctatcctaaatttgtgtaaatgtcttagagttacttagattcctatgacatgcagttccaatcacaagctctgggttcacattccattggctctaatcagggtccaccatgagttaacacggtcatatgactgagcctcagagtccccacctggtaaatggggatgacgagagtggagtgcccacctcaaaacttcattgtagattaaatgaagcagtccctgcaaagcacctagcaaggatgttggaacataccaagtgctcagtaaacgttagggctgagtattcctccttaggtgaaatgaagaagaatggatatgataactagaaaatcatctacattaaaaggtggagttcaataagctatactttcagtacagcagggataaaggagatgaggaagcaaaaagtaagttatgtcttcacatctaatttttcccaggattgaagaaacttaaaagatttgcctgaaatgccactaaattgctgcataccacattaattttgctcaaatgctaaatactttatcatttccataatgaagaaagaaagggaggaaagggaaggaggagggaagagggagagagagaagaagaagaaaggaggggagagaaaagaaagaaagaggaagaaaaaagagaaaagaaagaaagaaagaaagaaagaaagaaagaaagaaagaaagaaagaaaggaaggaaggaaggaaagaaaggaaagaaagaagaaagaaagaaaagaaagaaagaaagaaagaaagaaagaaagaaagaaagaaagagaaagaaagaaaggaaagaaagaaaggaaggaaggaaggaaagaaagaagaaagaaagaaaagaaagaaagaaagaaagaaagaaagaaagagaaagaaagaaagaaagaaggaaggaaagaaagaaagaaagaaagaaagaaagaaagaaagaaagaaagaaagaaaaagaaaggagggagggaggaaagaaagaaggaaaagaaaagaaagatagaaagggagggaagggagggaagaaggaaggaaggaagcaaggaaggaaggaagcaaggaaggaaggaagggtcccagctcgtgggacgtaatcattcccttctgctgtttgatgtgaacagttgggaattttgaactggtaattagaaaatgatagtcactatggaaaacagatctattcaccaataattaaaatcacaaggtacatcagaacctcagttatcagtaagaaattcaccagtgcaatcaaagagagaaatctgttgattatttgtttgcagtgttttgccttctgcctcaccctcccctaggtgagaggacctgcacccacacacccagtttgttgaagtattacttcagacagtccttgacctcactggcactctgatttttcatagccctatgctgtttacttctattctctcatatttgtaaaccaggcggggcgcaaatgattgctcaccttttagagatgaagggaagaaggcacagacacgttcaatccctgttctctgttacaaagctaatcactgacataatccaagtgcacagccactttcccttctccgacccagcgctggttcaagttctgaccccacttgcctttgaactccattatcgtccgggaccggccactggcccaagtcggtgctctggccacagactgccagatgccaaaggatcccacccctctaccagcttcccccaggctctgcctcaggacatcctttcacagccagcaactagcacctccgtgtaaggagcctgccgggcaaagatgccccctccataattaggctctcggcttggcttcccacatcctcagcagcggaaccaggacggaagaggctgcatggatgcctgaactgtttgttatttcactattgagttggcaaggatggaagtagttgatttacaattagaagcagcatgcttcttcaaatattaatattaataactgcactactgaacacatgaaaagaccttttcatcttcaaagcactttgcagacattaacccattagctctcccttccctccattcaggaacaacaggtgagcaagactctcaacagcagcagtggccaccctgcagcccttgtgcacagcccacggcccctgaagaaaaagcgttttctctttggataaaaataggccaccaaacccaaaaccacaactgatgaaagagttatagtatcagtaattttacaaatcaaatggagctgatggagttatcattttagaattggtatttcctgctgtttaacaaatacttttttctcagttgcatggcagtggtctaaagtaagaaggaaaatggacttgagattaaaaacaaaaacttacccaaaaggtgataaagaaatcctgcaatagaatgcattgatttcagtgacccagcacccttttaagtttgcctgaagaaaatactactttaaaagttggtaacagagacctttaacggtgggtgaggagtcacatacaaagtgtcacggccagataaaatcaccggatgcagaggaattgccatcgacatctcctgccactgagtccagctctaccgtggggacaagaaatacctccctaactctgagacaaccgcggcccacacccacaccatgtctcaacaacagacttaggaacttgtagatctttggacaactgcaggtcagtcccaagacagagaaaaacaccaaacaggctagtttggctagcaagattcaaacctgtagcaatttcctctctattaaaagcaattcattaaactactagcaggagaaaaaagtaaaacaatagatttactaggagtgaaagagaataaaaagaaatttatatatttaactacagctttatttctttggaagtgctccaatttgcaaaaaaaaaaaaaaaaaatcagggtttctgacaagtaatctacgggtatctaaaacgtgcatggttttacttttgtgaagcagggaacatttttaaaaacatagtcttgctttcagactattctgacgaggttaggaagtatttttgaaaattgttaaacaattaaatgggaatatagaaagacgtgaaaagagaaagagaaaactcacttgtatcctgaatctccctaccgacttactctttaattccacagaaatttttttaaagcaggaaaaggaaaatggactgaaaagttttaggcagaaactgacacacacctcacttactactttgccggagagcagatcctgagtgagcttccctcaaagtctgtggtctctttccaactacctgcgggaatcctctgctccgtagcttaagaggatgcaaagaccataatgtttctaatagagctgcctccttaaattggggggtgtggtcaagccagggaaagctggaaaaaaggcagtcttcctcttgcccctggcaccaggacagcagccactggcacaggcacagcagtctaggtggaaagcactgttgattgacagtggtggcaccaaatcacacattatttcgtattcttcaaattgtgcttcagctgaatataactcagccttggagagtaacagggagggagatgagcaaaagggaactagttcagtgggataacactgtatctcacctcatcatttgctgatgcatttactctctgctgaatatgtaaatattcatgcttcatgttccttgactttctcaatggagcccccattaacctaggcaaggtctcaggtgagggaaagggattgctttagaaacacaggacgtccaccacccagtcacctgctcaggcttcccgtttctctctaataacttgatatgaaatgtgatattttctaaagaaaagaaaataattttgtggaagagagctgactggatatggacttgggatttctgaaaagtaaagctaaaaatccccttttcatataagtctggttttaggcaatctctaaaataaggatacttttagcagccctgactcatggtccgtggtgcaggaataaaagggcagaagtgttcatacatttctcatttagggaaaatgtaaacaatatgaaaatcttacatctgtcctaagtgaaaatacacagcatcttttattcacatattcaggactatggtaagaatgttacagcataatctcatttctatgaatggagttattacaattttttttgagaagtcagtatttggctgcttaatctaagacttttatcctaaaagattccatcttctttgagtaggaggtgggagttaagatttgtcatagttggcttctttctctttttaataaagatacaaacttagaaaatccttgaaaatctaataactgtcatttggagccatatcatcatcagccttcattgtataaagctggcaatgcagttaagatgacattgtaagtaaagcaagattttactgctcatcttctgcctttgcacattaacttggaagtaaggaagaggtaatgctattggttcactttagtttaataaattgcctgtgccaggcactgttctaggcactagaaagatagcaagtttgcattgtagtgaggagacagacacataaatcaacgatctccccccaaaaatgtaatacatgctacaaaagaagtctatgaagagagctagggaagcttcagcctgcccctgtaacccagtcaatttcagcacactgccccatttaaagagcccacggtcaattataccaatcataactaattacaactgtattcactatgtttgcaggataattgaaaaaaacaaagttgagaagacttggattc

SEQ ID NO: 190 - DNA, 91216 bp, Homo sapiens
  source 1..91216: mol_type = genomic DNA
atccaggctgaagtgtggtggcatgatctccactcactgcagcctctgcctcctggtttcaagcgattctcctgcctcaatttccccagtagctgggattacaggtacccactaccacagctggttaatttttgtatttttagtagagatggggttttgccatgttggccagtctggtcttgaactcctgacctcaagtgatctgcctgccttggccaaagtgctgggattacaggcatgagccactgcacccagcctccaacagatctttttctatttgaaccagctagagaggattctattgtctatcactaaaaatcctagctgatccactgtattttaaattttaataaaggacagtaaaactattttgaataaaatgctgttgacattctcctgtccttgatagaaaaagggctttgggttgcttttccagaaaaggtaaaagattagtacaaatctattaattaatttgcttgggggaaattaacattgcatgacttatattcaactagagagacctgcttatctttcatcagtgctactggacagtagatgccccagctccatgtagctccctcttcctgagacagagtctcactctgttgcctaggctggagtgcagctgtgcgatcttggctcactgcaacctctgccttccgagttcgagtgattctcctgcttcagcctccaagtaactgggattacaggtgtatgccaccatgcccggctaatttttgtattttagtagaggcggggtttcaccatattggccaggctaggctggtctcgaactcctgagctcaggtgatttacccgccttggcctcccaaagtgctgggattacaggtgtcagccataacacctggcccctcttcctttataaatgtgtgaatctccagaaagaaatgtcagaccttcttcattcctctcctattatgcaacaaagcacattgatttcctgatgttggttcgttgctttttgggtacaaataagaaagaagcaagccactgtttttttaaaaaccacctatatggcagatctcattcaacagccataagagagactggtttgaaaacttatgcctcccctgagccccctacattttatatttttcctgaaactttcacacttaaaaataatcatttgggctgggcacggtggctcacgcctgtaatcccagcactttggggggccaaggtgggtggatcatgaggtcaggagttcgagaccagactgaccaacatggtgaaaccccatctctactaaaaatacaaagattagctgtgagtggtggtgcatgcctataatccctgctactcaggatgttgaggcaggagaattgcttgaacctgggaggcagaggttgcagtgagccaagatcatgccactgcactccagcctgggcaatagagcaagactccatctcaataaataaataaataaataaataaataaataatcatttgaggatatgaataaaaaccaaatcaaatagtgcatctgtttaagtcatttatttcaatacaggcattgttttaaatttgcaccttgtctttaacacatttcataaccagagaacaggtctgagaacaagtacataaaaggattatttgacaaagttttaacaaaagtgcttacagcttatttgtttcagatatacagaactgccagtcacaaagagccactaagtggcaatacagccacaaacttgcctgggaagtaaaatattttacatatttacactgtacatttaaatgggatattctgaagcattattattatcaataaactctaagcaagaagttctcttaaaccctctggcacttaacaaagaatattaattttatggggctatgagttttacagtttgattcccatctttgccataacctaaatggatttttaccccctccagtacacatatttacctcctacacaaagtagctgttattagcttatcaccaaccaaacctttgttagtagcagttggaattttgttggcatcaatgtatttacaatgtaggagtaaattatttagaggggagtctctaaaaattaaaataacttcattaaaccctattttaaacagactttacagtataaaatttatggttatagaaatctagtatctaaacaagtttataatttataaggtatttattacgattgattcccctatgatttactccatttacatgaatgtttattttaataatgactatatctttcagaaaacaagttatgaatataaaaatgactattataagttaccatagctataccaaaaatgaacattaaaatgcagcgacttgtatgttaaaatacatagaaatttgctatacttctttaacaagtgctttataaaagtataaaattataaaaggtgctattttcatgaattttgtgttttcctgatacttcagccagaccaacatgcaaacgttacaaatagagcaactgaacactggccatcaattacctttgaatttaaacagtacattccagcgcagtctgggccccaaagcagtttcacccttacctaacttacctaactcttaatatagcctaaactcactgaaaaataagctaacttcatttcaccttttgtagcatacacgtagactcagagtatatactgaaatataatttgaaagctgatcattaaaaaaatcaagaacctcaatattaaaatattaactctgagtatcttaaaattgcatagaaaatgtaggtcatggtttattaaagttttacttaaataatcagataaatagggctggcgaggtggctcatgcctataatcccagcagtttgggaggctgaggcaggcggatcacctgaggtcaggagttcgaaaccagcctggccaacatggcgaaaccccgtctctgctaaaaatacaaaaattagctgggcgtggtggtgggcacctgtaatcccagctactcgggaagctgaggcaggagaatcgcttgaacctgggaggcggaggttgcagtgagccgagattgcgccattgcactccagcctgggcaacagagtgagactctgtctcaaagaaaataataataataataataataatcagataaatagaaaaagaggaaaggcagaatttacaaacatatattaaccaagaaatagtgttatttattctttaccatacaaatttgcattgaaaagttcacaatatttgatttttgagctttctgagctcaggattggtcagagcttgaagtttaaaatagttgacagatttagggaatagctttcatgttagttaccgcatgttcattagctttgagttgcatgggaaccatgtaaagtaacccacgcattttgcgtctatgtaagggaatgattagaaggataacaacaacatagttctttcttaactctctatcagttccagatctctatacacttcaccaacatctatcattattcttagtttataatgatgaaacagactaggtataaaaaatggaaaattagattaggtcgcgaagcaaatataaaccaagcaagataaaatccactcatgttgactatcatagtattgagatccaggaatccatgctgtctgtagttaaagcagattatcttcactgccatctattggtctttatcctgaattaggagagaaatcccccgaggttctgcatggcaaataaagagttaggaaagccaaaatatcagtgggtatcataagtgatttactctagataaatcactgaatcatagtgacaagcccttaggagctctgccttagaatttcccaagggtttcgtagatgatcctgcagcaaagaatgaattccagggtgtcagatctgacttgatggcattttagggacttggccaaggttcccacttgatatttgggactaaaatgccccacctgaaaagaagcgttctaccttgcaattaaagaaaatgtgggccaggcacggtggctcatgcctgtaatcccagcagtttgggaggccgaggtgggcagatcacctgaggtcagaagtttgagaccagcctggccaacctggtgaaactccaactctactaaaaataccaaaaaaaaaaaaaaaaaaaaaaaaattagccaggtgtggtggtgggtgcctgtagtcccagctacttgggaggctgaggcaggagaattgcctgaacttgggaggaggaggttgcagtaagctgagatcatgccattgcactctagcctgagcaacaagaacaagactccacctcaaaacaaaaacaaaaacaaaacaaaacaaaaaaagactgggcatggtagctcatgcctgtaatcctagcactctgggaggctgaagtgggcggattgcctgagctcaggagttcgagaccagcctgggcaacacggtgaaaccccgtctctactaaaatacaaaaatattagctgggcgtggcagcgtgcgcctgggtgcgcctgtgatcccagctactctggaggctgaggcaggagaatcgcttgaacccgggaggcggaggttgcagtgagcccagatcatgccactgcactccagcctgggtgacagagcaaaactccgtctccaaaaaacaaaaacaaaacaaaaccaaacaaaaaacaaaaacaaaaaaaagaaaatgtgaaaatggatagttctgaggaaatgggaaaagccagttgctgagagaactgcagtaaaggtaagtcggtcccatgaagggatacctacttcctacctctgctcctcagctatgttctcttcataagcagaaattctgtgaccaggcaactttctgtatggtcaggttgcctggcctaagtccttggcttgactaaaagcccttaataatccagccagtcccccacggtttcagaggaatttctaggactgctaaccttctattggcttactagggattcaggtcctaatctataacctcaacatgtgctttgaccatgtgcctcccaggctccactacggatataacaggaagtacttacaaaattcctttatcttttttttttcctttttgcaatcagtttctcaggttaaaaaataaattcctttatctttgtttgaaagagaagatcaccaccttaaacttcctaaatgttcatgagtcaaacaggatgataatatttaccccactgttatcatccctaccttttatttaatgtcatgagtatagggtgtggaccggaagaagcaatacagagtttcacagttgtgctgggtaattcataagttttgtatgtgcctgggatattagggttgtaaatcacaattaaagatgaaaaatgttaggagggaagtaaagcagaaagcccaaatcagacagtgaatcagggattaagtgggagtggtggaaaggcaggctaagaacatttacagagatagaaaatagcagagactctctcaaaacaagaattcattgttctagcattcaggaagtgtctatatagggtgtggaggaaaaaaaaggagatgtgggacatttcagagcagacactgcccagactagatcttttatccttccatgcacatgcacatgtacaccttagttccattataagcttttggtgaaaaaagtaaagcattttattgaaaaagcctcacagttctgactctttgtcattttcatccaggtagtattcatcatctgtggttgtgtctgtgtcacaatttgagtccactgggtcatcctcatagatattaagcggttcacttggagataagccatcttctggcacctgactactgggagaatttgagcttaatgactctgaggggttgggagggttcctcaaatcatcttttaggaagccagggttcttaagaaaacttggtttccataatcttccttgtgtaagtgacctctttacattttctaagaaagctaactgttgttctttcccaaagatcccatagtcgataggtctgtatatagatattgcagacctgggacctgtttttgtcccgctgcgataagcccaactttcatttccatcacaggaggggagttcagaaaaagatctgaatcttcgactgtacccattgttgacagagaattcattcccaagggtcagtcgactcagggcattgtcaatagaagtgctttcagaaaaatggcgctccctgacttttggaggatggctttttcgtagtagatcgccatgaacattaatgctttttaaactctttgaacgatagaggtgtggctcaggttcccactccagagatgaagcactcctttgttgctgcagaaaactggccagtggactgcttactctagatttctgtgcaggctccagtggaaaaggagggctcagcctcctctgattgtcagagaattctgcttccctgaggctggtgaatgtgatgggtgatggggctcctgattctcttactaaattctgagctgctgtgacgtctttagaattctcatgctttgatggtgattctgagacgtttttaaactcattctgatgtcgttgtgaaatgctgttagacttctggttgctgacgtgtgtagaaggttctctgttgggtagtacagtaatggggagaaggttctcggatttcttcacatgctttccgttctcactcaacctgctttcgccaatggactctgcagattttggagtaggctcagggaacagtgggttgcactccactgtgccaagagataaatggtcaaagccagatctgcttccactttgggggaagatagtagctacatgtcttctggggcttacatctttagctgggaattttctgctggctttagacatggctgccaatctgtgtttaactgaagatctattttccccctttactaggtcatccaagttggttttatttttgtttccttcaggaagtgaaggttgatcccaagctgacttctgcatttcatcttcagccttcctgctctctgtcatatttgcctcctgacttctttgaggtaattctcttggttcagactgcagactctctaagtttggttcatctgactgagtctcctcaccaagctgtagtttatgcaatgctggagtaagggcaaagacttgactctctgagtgagaaagtgttttattagtcattttttggcagttggttccaatgtcccctctgccttccctaggctgtgatccactggagccatcacctacagctgtggatgtgtgatctttctggggacacttgccacttccagtaaatggaatggctctaccactccctgtacactcccaagaacttcttctagtttgggaatttccaatattaacttctgaaagagctggaagactagagggaccactgttacttgaattaatggattgttgacaattttcagatttttcttcggatacattttttctctgaagcatcaatgaagtatgcagggtttcactttgcaactttttgcctctttccttcttgttttctgaatcacctagaggtgttttagctaaattatctgaaaaaatctctctagctttagattcctcttcaggaagagaaacagctgcctcaacagaagccatttcctgtaatgtaggagctaggggccccctatttgataatcggaaggcagtcatattttcagtggtgagcgtctgatcagagttgacggacatctttagattttcacatgaaggtgttcctgactgctctcgtgtagaataattctgtttgtctttttctaaagcgttaggaaatgtttcagtctccacttgaggtgattctataagtaaattagtattttgtgtatactgttgaaggaggttacagaattttttgctgggtttcctcggtagagtgtaatatattgagaccacctccagacattttacattatcttcatcaccagaaacagaaaacgtactagtcgtcttaactttatgtaatgttttcccacgttcttttcctgacaagtctgagcaaaaaggtaaagggtcttcatttgaaagagcaaatacacttctcctggaggcagccattttaccctctttctcagtgtattcttggaagttttccttttggtgttgtcttttggttaaagaacaatctctaacagatgagtcactttccacagggctaatgattctctcccaagcccttggtgttagctcagaagcatccatgcctgaggtcaatggcttttttcttccttctcttccagttgaggcatgtggctcccctgagggacatgacatagccctgttgatgaggaatggaagtggtccttttctaacggaagtagatccactgctttttacatttgtcattctctctgtggcttcaggtgcttccagggctgagtctgaaaggactttggaacattcattcgctgactcaggagaactgggactaaatttgtttaacatatagttccccattgcatcttccacattatttttgatttggaagggaggtggcccattcctcaatgaagcagccattattttacttcctgactgcctgccatgtatgagaaaactgcttgattttcttggcaaggtacaataaattgtgtcaagttcagaaactttggaattgctttgatttgcttcaatgaggctcctgtgatcactggtgggtactgatatactttctgttttgcttaacttttcaatacaggatatatgatgccttatttttccttttcctctttcattcctaaaaggagagtgtgaatggcatttgacatcaaccacttcatcatgtgtaggcacaggactatcatttctctcttggttttctgagtggcttacaataaactgattcttttggttcttcccagcattgtctttttcttctctttctcctagcgatggatctttgtctgaaggacttctcctggagaacactgtagtagatggaaccacaggagcatcaagggaagaattctttgatggtgaggaatctggtagtgcagctgatgacagatctaaagaatcacacgaggtcttgtggccaggagttaacttgcattttgagtattgtgcattttgagtatcagtcagtgcagagctccagtggttatttgtaataattcttgaaatatcttcattatttacagttaattcctggtgacaaccttggtctgtcctggggaaagatggtggtgttctgtgttcctgaatgaaaggaagggaagctgttgagccaagttttctgttttcagtaaacctcttatcttgtttaatgtcattggatttatctgtgtgcggtatatacattttggaggtatctttcctggaaaagactctgggtgacttttttgaacttattatggtagatgcattaaaaccaaacccgttgctcttggctgagtcctgggataagggattttgaaaatcaggtaaagagtttgagatccctgtctgtgaaacaggttggggtatttcacctgccttgtttgtctggtccatcttgcttagctgtttgtcttcttctgaaatagattcatttaagtctttctcattatttacttctgtgaccaagatattgggctggcttttggcaagaggcagagagtcaactgaattgctgctggtcacagtgacttctgtatggcttctcattggatgagaggcaggcttatttggaaaaattttctgcaaagtgactgtgggattctgcaagttgggactctgaggattccttctgtcatcagaaatctgggaaaaggaagttttgaatgaggatgctagagtctgagcaattccaaatgaggaagcttctttgtttatatgtacttctacaggagaactgtcctgttgacttaccaactcactagatttgacgtgatagcttgaaccagtcatggagcaaacatttggtgtgccaaaatgaggagtcaactgggtctcattaccatgtgataccaccatgctatccagtgtggatctctgaaaatcaaactgccaaggatgtggctcttcttggcctctggaaacatctgttccataaccagaagaaaatgattcccagtgttcagaagaaacattatggccatgaatggctgatacactatttgcttccatggaaatcatttcaaagtctctgtcagaagaactgaatgatttcctgcttcgatgaaagtcagaccagaaagaatgtcctttctcttggccccaaaaaggaccttgtccaaatctcctctgttctccgcttcgtccaaaggtattgctgaagaaagatctggtaaatgtgttgctttgatggtagaatggcatgttctctgagttctcaaaagtgtcgggactcattgcattctccatgggagcatttaaactaacacgttggtaaacattctgtgaatggtacgattcatatctcttattctcctgaaaacccctgggatacacatacttgtcagcgggatcaatttccattggtgatggtgccctcaggaactcttcctggttctccctgtctctagaggaatctgatctgttccatatgatggatgataaaggagttctctttggactctgctggtgccttggtggtataaacccactcttgctctgagttgtggctggaaaatgtaagcttcttgctgtgaaatgccctgtggctggtaaggccgaccgttgcctgctgtcaaaacacagcgaagtactgccaaaagtattcttttgcacataatcttctttaaagactctgggctcccttgtcctatacatatcataaattgtgcttgtcctaggagaaaaggttttaaaaccttccctaggagttcctggtcttaggatgtcatagatagacatattggaagtttcattatagtgttttttgtgcctttctgtgatattaccatgtctgttaccactggaataaaagtgaccgaactgtgttcttgatccatagttgaggggtgttctggtattcactgagcttgcagactgttcctgagccaatttgctatccaagtcatctaaaactgaaaagagaatgtgaatcaacctttttctgtatgtttttacagtttaataataatttgagttattgaaggctccttttcaagaaacataatcatttataattttatttttatcatattatcatgttataacattaattttgattatatttttaagatagcctgacttttataagactatagtgaaaatttctttcctactttttcaaatcactttttttcaaagtaaaccttccattaacgccgtaaggaaattgaactatattcttctaacaatgaattttaatcatgtttttttttagtgcatctaaagtgtattgagtttttctaagatatggaccagtaataaaatggaattaataatgcagacattgaataactagacaattgttagtattattaagccttgtctttctgtttctttcatgtcactaggttgctacaataattccagctgtgtatacctcctgggatcataatagaaatgaacctctgtaagtagcatatgatttctaggttgtactgttaagaaaacagtattaccactaaaagcttagcacctaatttatgaacatacttagttggatatataatattattaaatgatatgccaatggtagatttttttttctggaaaaattaatacccattaacactcctataaaacagcactttctatgtgtcaggcagagtcctaaacgcttaatatattaactcactaagtcgtcacacaaacttagaaggttggtcctattactattctcattctataatgaggaaactgatgcaagaagagattaagcaaattcctaagatcacacagcactgggatttgaacccagacagtctgtttcctgaatccatgcatacaaccactgtacaatgcaacctctgtgccataaaagctcacttttgggccgggcacggtggctcatgcctgtaatcccagcactttgggaggccgaggcgggcggatcacgaggtcaggagattgagaccatcctggctaacatggtgaaaccccgtctccactaaaaatacaaaaaattagccgggcgtggtggcgggcgcctgtagtctcagctactcgggaggctgaggcaggagaatggcgtgaacccgggaggcagagcttgcagtgagccaagatggcgccactgcactccagcctgggcgaaagagcgagactccgtctcaaaaaaaaaaaaaaaaaaccagaaaaaaaaactcacttttcatattttgctctttatgaaccatacagatgattttactgtgagacgagctcatagttttacaaagacgtgaagttgctgttgtcaaataatgatgacttttctctcggtagcaaagtcagggagtggtgtcaaagtcagtgcccaggggcccccttacgataactgaagacctagaccaagcccagacccagggctcatgctctctaggaccacagcctctgtgatcttagacaagccacagcatccttttggtgacacagttggcttttctttgaattgtatccatttaattgtacttgacatgttttcctcaataaaaacccattagattttgaatagaatcataatcttttgaggtgtgtagactctctaagacccactctataatagatatagtttactatattcatgttcaataaatacaaataaattacaaattttatttcaactgtataatgacaggaaatgtaagtgtctgagcacacataagtgaaatgtacatgcaacatgccaattaagttagggcagatgctaaagggatttaaaaaaatctgttctggatttttccctatcctattttatttgcaagttggtgttattaagtttgtacaaccaaaagaaaaactgatcttgaacattaaggatatgtaattaaggaattcttttagggaattatctgtgaatgttttagtgaaaaatatttatttacccctaggacctgaagtaatttgttccctatagccacaataaaataatcaagcaatgctgaagtataaggtggggcaaaaaacaaaacaaaacaactgcataatgaataaaaatctatctttaaaacaaattataatgaaaatctctttgatacccattctccctttcaagctgtttatgtttttctttccccttaaagtcttggttgactacaagagcagaatgtatttagaacagaaaatacagaaaagtataacaatataagtaaaatcgccaggaattctacctagaggtaaccattcttaacatccccatgacaagattttaaattaaagccacttagaatcccagattaacaatgctgtttactcatcactcctgacatcagaaaaattcctgttctgcttctctacattagtttcagaaaggccacattattattattttttcattattttttcattccataaacagtagctctcctctttcaacaaaaccttcattttggaacaaagattttcctctgttctctgccaggaagcatcttactgaagaaggcccctacgttgactgtccagctgactgtctctacccgactgctgtcccacacaatatgggccaggcgatggtattgcctttgcaaactaaatgaagttcctcaaagtgaagctggtggcgacttcagagttaacttttcaaatggccgggcttatatagaataacctttgtaaaagtaaactatgatcatataataagatacatgtgcatttggaacgccactgcttttggaacctgtctcagtttttatcatcatacaaggttaattgtctaatgtcaattagattttatcacagtgcatttgggtcctaatctggaacaataaaagtctattaaacagcaaactttgtagatgtatttcctaaagatgtatttcctttttacctgaggttaattttttttttctgcttgctctgtcacccaggctggagtgcagtggcatgatctcggctcattgcaacctccgcctcccaggttcaagcacttctcctgcctcagcctcccaagtagctgagattacaggtgcgtgccaccatgcctagctaatttttgtattttcagtagagatggggtctcaaactcctgacccctaaggttaaatattaaacattattactactccatatatttatcagtccatgattcaagaatatttgcttagattatatttaatcataagattcttaatacttgtgttaataacatatcagcatcctcttcaaataagctaaacatgaggatgtaaaaaataaagtacagtgtttcatatgttttgagtagtttgatacaaactagttattgtttacttcctttagttatcagtagttgcaaaggcaatttaatgcatgaacttaccttggaaaaactcattctccagcagtgaagcatcccacggtggaggcatgccactctcctccctcatgactgctggctttgggacaaatgtactgtcaactagatgattttccagaggtgaattgtatatttttgcctgctaattttaaagcagagaacacaatattatttctgagccttcaccagtcaaaatactcacacgctcccaccaaactgtcccaagcttaaaagtattagtctaaggactgcaaatccatttttctaatatttatttctcaatttataatgtgttgtttttgccatttgtaactgacctgcaacttctctatacctacattaattatttcagtgataagccttcaggcaaggtactgagcctctctctgccaagtttcctacgaacttacacagcactgtcagaggcgtttgaatcagggcaactccatctcgaataggggctgggtaaaataaggctgagacctactgggctgcattcccagccggttaaggcattctaagtcacaggatgagactggaggtcggcacgaggtacaggtcataaagatcttgctgataaaacacgttgcactaacgaagccggctaaaacccaccaataccaagatggcaacaagactgacctctctggtcgtcctaactgctacactcctgccagcaccatgacagtttcaaatggcatggcaacatcaggaagttactctatatgggctaaaaaggggaggcatgaataacccaccccttgtttagcataataccatcaaaaaataatcataaaaatgggcaaccagcaacccttggggctgctctatgaagtagccattcttttattcctttactttcttaataaacttgctttcactttacggactcgccctgaattctttcttgtgcgagatccaagaaccctctcttggggtctggatccagtattacttttctggtaatatcttcctggcgaccacggaagggccaatactaaggaaaccttccaaccaaaggctaactttgggtaagtggtggggtgtggtaacagcattacacagatcttagtgggggttccttgcagagaggaaagaaatcgacccctcttgagtttggagtgctgtctccatggctccaatggcttggattttggatttcctaacgttgtacctattttttcaagaccctgttagctagaactcgtagtggaccttaagatttgtgaacttggccgcgtgcagtggcgcacacctgtaatccccgcactttgagaggctgaggtaggcagatcacttgaggccaggagttcgaaaccagcctggccaaaatggtgaaaccactgtctctactaaaaatacaaaaattagctgggtgtggtggcgagtgcctgtaatcccagctactccagaggctgggccaggagaatagcttgaactcggaaggcggaagttgtagtgagctaaaatcatgccactgcacaccagcctgggcgacagagtgagactctgtcttggaaaaaaagaaaaaaagaaaaaaaaacccacaaaaaaccaaaaatacaaaaattagctggacatggtggcagatgtctgtaatcccagctacctgggagggctgaggcaggagaatcgcttgaacccgggaggcggaggttgtagtgagctaagatcgtgccactgcactccaggctgggagacagagggagactctgtctcaaaaaaaaaaaaaaaaaaaaaaaaaaattgcgaacctgaggatttagggggaaaaatgtgtttctattagaggtcatctagaataggggtccctgacccctgggccacagaccggtactggtctgtggtatgttagaaatcaggctgcacagtgtggggtaaagggcgagcattaccgcctgagctccgcctccagtcagatcagccctgggattaggcgttagattctcacaggattgcgaaccctattgtgaactgcacatgcgagggatctaggttgtgctttccttatgagaatccaactaatgcctgatgatcagaggtggaacagtttcattcccaaaccatccaccaccactttctgtggaaaagttcttttccacgaagtgggtccctggtgccaaaaacggtggggactgctgatctagaatggtagaacccctcagatgcccataataagctgatctggtagttctgcaacaaaggcactcaaaagtttgattgtataaataataaatggctttaaaaaaacctattgctagtttttcaatgaaaggatttaggagaatgatatagaactaaatttgttttcctttattattgttttatttattcatttatttatttatttattttgaggcggagtctccctctgtggcccaggctggagtgcagtggcgcgatctgggctctgcaccatccacctccctggctcaagcaattcccctgcctcagcctcccgagtagctgggattacaggcgcacgccaccatgcctggctaatttttttgtatttttagtagagatggggttccaccctattggccagacaggtcttgaactcctgacctcaggcaatcctcctgcctcagccccccaaagtgctgggattacaggcatgagccacctcgcccagctattattattatctttgtttactaacaaatgtttatctttatttcataaaatctaatcactgccctactttcaagcttttgtcttcataaccttgcaaacattatccaccccatgccttcactttcttgtgccaaaactccatttgcgtttcctctgtcaaactggctctgtcactcatgactccactttagctcatcctgcactcatccacttccctttccagtctttattttcagctcactctgctacccagtccttgcctcttgaatccctctccccacctcaaaatttccctttctatttgaccttcaccactatgttttgtctcatctttcatgcctaagaccacatgtcgatcctttccaaagctccaacttcttaatttctccataacaggtctgtctgattccacggcgctggttctcttaacccctacattccttacgaccttgtgttttcactcctgcttgttttctttctcaaggtctaggtcagttatttcctacagaaacctgcccaaatttcattgacctatggttttcagttctatgagcaagccacaattgactactcacaaaggagatttattaatacggaaggagtgctcccatgataacttattggtcactgaatatgatttagcatactaatataaaattcggaagtaaacaaatgttaaaagcaaaacacaactataatgggatactgattagaggtaataaaacctcaaactaatcatttgagaaatcagatcagttaaagttaattctttttaccctacatcaaagtgttcccttttgtctgtccaactcagaggttaccctacatcaataattgttagtattagtgataataacaattagttacagatcttataagtcctttcttctcaaatctgcaattttggtagttggtgcaaagtagatatatctgattaagagaacagtaggcataattctctctcgaccatttaacaccaaacaatcttttctctatgtatgtagaccagtacatttcttgtggcccccaggatcacattcctttgtaatgataatatacagtgaaatgaaaagtacatgaacagaggggtcacgtgaagagatgaccctctctagattgggaagaatcactaccctctagagaccctgagtataatttcctctggttttatttctgcccagaccctctacttcaagacctatcctactcaacgtgttcaggatgctttcaacacacagagatgtaaattatatacctagcaagagaaaataccgaggtttcatttacactcaactgtaactctgcaagggtgaggttagtgattttttttttttttaaaaaaggaactgttagtcaatagtaggtatcagacctaaagattgaaaattatcactaccctatagacttctaatttttatttaagctatgtgtgagatattattattattgttgttagcagcagcaactaaacattgattattctaggcaatgtgttaagggctttatgtgggttactttagttcatttagttttaactaccctatggagttggtactcttattatccctactttgagaaaactgaggtttcaagaggtcaggtcatttgcgtttggtcacactggtggagggaggagtttcatttccagtttgtcagattccagagccaatgctgaaatacctcattctactcatgatcaagttttgcagctcttggcttattagtgcattaaatccttgtagcaggcattctctgaagccaaacacaggtcatagagcttctgggaagcacctgaagtttcttgtgacctagaagagaagtaaatctctccaggacccagagcagacactgactgatcctaattagggctcagttttggactcagaagcccctcaaaataatgctccgtgctttggagttgccataaaaggtgaagcctatttcccagccctggcctagaggataaggatgttcaaacaccttttttgcagcacaattgtgtcaaaatcctttccaatttttttttttttaagagacagggacttgctccatcacccaggctggagtgcagtggtgcaatcacagctcactgtaaccccgaactactggctcaagcaatcctcccacctcagcctcttgagtaactggggctatagatgtgtgccaccatgcctaattttttaattttttgtagaaatgggtttgctatgttgcccaggctggtctcaaactcctgggtgcaagcaaccctttcaccttggcatcctaaagtgctgggattacaggcatgaaccaccacgcccagcctccaactttcttgtatttgaacaaaattactcatttatttttaatatacttaaaaatatcctctcttactgaatccttataacaaatttgtgaattaagtaggaattatcattcccattttttcagatgaggaaactgtatctcatgcaagtgccttactgaagtcacatgaataatctatatggtggcactggctactcatactcatatgatctgatcccaaaccctcttctttccattatttttttttaccgttatttcactaatgtacatatcttcagttagatggtaaactctctgaagaaaggaaacttgtcttagacattccatgcctttcattgtatatggcatgacactttgcacatagttatgaattgatttatgatataccaaggtggaaaactaactatataaggctgtgtgtggtggctcatgtctgtaatctcagcattttgggaggccaaggcgggcagattgcttgagctccagagttcaagaccagcctgggcaacatggtgaagccctgtctctaccaaaaatacaaaaacttagcaggcttgatggaacatgtctgtagtctcagctacttgggaggctgaggtgggaggatcgcttaagccctgggggcagatgttgcagcaagcaaagattgtgccactgcactccagcctgggtgacagagtgagactccatctcaaaaaatagaaaactaattatataagattactagtatatattattaacagacattgagacactgaagatttgtaatattaggattcagaaaagcactttggaggcaggacagtatagtggttaagcacatgagctctacataggttccaatcctggctctgcccattaatatttacatgactttgggattactaatatatattattacagaaattgagacactgaagatttgtaatattaggactcagaaaagcatgttggaggcaggacagtgtagtggttaagcacatgagctctacataggttccaatcctggctctgcccattaatatttatatgactttgggcaagttatctaatctctttgtaccttagtttctttcttggtaaaaggaaaataacagcaacaataacaatacccattgcctagggttgctgtaagaattaggtgaattaatattaatagttgtgatgcatttagaatgatgtctagcacttagtaatccttattgttgctgctactattcttttgtggttatagagaatttcctggaagactcctgttgatgctggtagccaaatgaggtagaaaagtatcccacaggatgagaggccattgcaaaatgctggctttcaggatctcagttacatggtacataaaataggctgaagaaaatgaggtcttttacacaactccaattcactccactgatactgtctgtgattctgacctgactagacaaacaaacctctgtcatagagtagccttagagtacttgagaacttcctagggcagccaaacctgtagaacagctgtcagagctgaagcctaaactcactgatgttatcaaatgccttggtaaaatcaacaaattaaattttcaaggtgttcctgaatttgttccatgtctgttctcctgcacaggtcatatccaccaatgtagctgcaacttaaaaccactcattcatttcttctttcaattactgagtgttcagtttgtgccaggcagtggggatacacagcctgatatggttcggttgtgtccccaaccaaatctcatcttgaactgtagctcctataattcccacgtgttgtgggagggacccagtgggcgatgactgaatcacgggggcggtttcccccatactgttctcgtggtagtgaataagtctcatgagatctgatggttttataagaggttttccctttagcttggctctcattctctcttgcttgccaccatgtaagatgtgactttcaccttccgccatgattgtgaggcctccccagccacatgggactgtgagtccattaagcccctttttctttaaattacccagtcttgggtatctctttatcagcagcatgaaaacaaactaatacacaggccctgcctgaggagcccacaccaatctggacaaaaagcccagtgtaagaagtgccacattggaggtgtgttcctaagggtacagagctggcagtatcactggacagtagccagagtttgttcagagataaggagtagtcaagtggcccaggcatgctcctaaacatcctgcaatacgcaggagtccaaaatgtcaatggtgctgagattgagagaaaccctgggctagatgatctctaagtgtttctctagctctaaaatttctatgttttctgaaatttctatgtgtcttttgcttcttttaagcttatgcaaatgtttaagtagcagcttccttcttttttaagtggaagatcatctaataatatagtacaacttcccatgaaatagtggaatctgcttgtaccattcctgcctggctgccaaccaagtgatgagaagttcatcacctcaaatcttggggagaatcgctatggcatccatggtcaatttccagctctctgtggggttgaggggatagaacttccttgaataagtaagagaaatctacacgtcatgcagaagtcttattttagatattactttaaaaatttagagatagtgctttcattatttttttctttctctctctccttttttaaatttttctttttcttttcttttttttttttttgagacaggatatctctctgttgcccaggctgtagtacagtgatgcaatcgtagctcactgcagcctccaactcctgggctcaagtgatccttccacctcagcttcctgattagctggtactacaagtgtgtgccaccacacctgtctaattaaaaaaaattttttttttttgtagagacagggtctcactatgttgcccaagctggtctcaaactcctggcctcaatcaatcctcccaccttggcctcccaaagtgttgagattataggcatgaaccactcttcccagcctctctcttacttttcataatagctattcatggggagcaacagtcactgggttccatttcccttatttgcccagctcttgccttttagactgacatgctccaagcagtgaaatggtttcgtgcaagtgggaatcaggactgtcaaagtaagatgtctattaatccctagactggattttcaaatccccaaaacttcaaattagctccacttctttcaggcatttgcctttctttttacattccttttctgcctcagaccccgtggctctcaaacggcagaggatggtcagtctgaatacttcccctaggaaaaccgagagtacagaagcatcctggagcagggctctgtcctctcagagggcaaagctggatggggaggtcatgccacttcagtccactgcttagttaaagcagagtctccgcaggtggcgagcaactggggtccatgtgcaaacagcacatcagagctgaggagctgctggcattactgacttcatgctgtggagttccaaaaacccaggctttctaatcctcagtctgctatttaccagggtgaccttgagcatgatctttaactcgttaaacctcactttcttcatctttaaattggggagaataatagtacctcttttatagagtttctctggggattaaacgaaatgatctgtgtcaagtgcctggaggacagtaagttctccattagagtgtagcaatttttagtgctggtgtcatggttggggctgaggcatatataggagaaaaatagggctcagtgttatcacccagaaagaagtagtgtaaagaacctctgtttccagttgggcatggtgactcacgcctgtaatcccagcactttgggaagctgaggcgggaggatctcttgaggccaggagttcaaaaccagcctggccaatatggtgaaaccctgtgtctactaaaaatataaaaattagctgggtgtggtggtgagggcctgcaatcccagctaattgggaggttaaagcaggggaatcgcttgaactctggaggcagaggttgcagtgagccaagatcataccactgtactccagcctgggtgacagagtgagaaactgtctcaaaaaaaaagaacctctgtttatatgcactcctcctcaccagaattttacctcatgctttttgcaaagagagagggagggagagagagagagagagagaaagaaaaagggaggacccagtactaaggcttcgatccactgataaatatacttgctctcctcctgcccgctttcaaaaccttcctaaaggtcccttccaaaactctccatttcttttatctccaaaccatacgagttacacaggaagacacaggaatgtgtagatcaaagttatgaccatgaaaaagcagaaacagaacacttaagcttctttatcttgtcagcatccgaacatggtgacaaatttaaattttagcctctgaggaagcatctcgctgggtcaaccctcatgcgaactttttcctgcatctcacctatgagaggcttcctctttgagtacaaatgataaccacactcagaaaggatctggtgcaaacccatcctggctggcaaacgtggctgtggctgcctctggccgcctcctctgcccaacacctcagggctgtacaggggcaacacgtggcaaaatatcagagatgccactgatggcataagtggaaacatgatggcctcactccttcctggcagagaattccagtatcaaagtcaactggaagccaaatataattgggaaaatttgaactcttagggagaaatccaagcttctaaaataaatttaaaactgagccgaggggaatactactgaaataggtagccaccctgggattacataaattctgaatttcttagagtaacctgtagttatctggttacttaccacagcagctcccctcacaggcataggaggtcctgcatggccatcacatctgtggaaataatttgaaatgatttctttgaagaagagcctaacttttaccaggcggaaaaatcaacagcacatttgccataagattttgacaccttgagaagatctatttctaattcactgtagaaagatgtttcttcgttagtgcattattgaaaaaaattagaaactgtttcctatgattacccagaatcaatactttacatctttgtccctcaggtagccaagaaaaaattacatattagtggatttgcatttgagcacaacatgacacataaaatataatagctatgtttgttgcactgtttattctgtgtcaggcctgatctttgtgcgtgttaattcatttagatacatcactctcctgagatggatattatggctactcccattttacggatgagaagatggaggtacagagaagtcagaatacatagttagttgctgagctaggagttgggcaaagtctgtctggatctagagccctctttcttttcttttttttctttccctttttttttttttttttttttttgagatggagttttgctctttgtcgcccaggctggagtgcagtggcataatctcggctcactgcaacctccgcctcctgggttcaagcaattctcctgcctcagcctcccgaatggctgggattacaggcgcctgccaccatgcctggctaatttttgtatttttagtagagatgggttttcatcatgttgaccaggctggtctcgaactcctgacctcaggtgatctgcctgcctcggcctcctaaagtgctgggattacaggtgtgagccgtggtgcctggccagagccctctttcttaaccagtagagcatgctgactttttctcctaataggaaacaaattttctgtttctttgcatttttattttaaagagcaattaagtaacgaccagatttaacagtacataatttaaagtaaaaaaaaaaagagagaaaaaaaccactacaacaacaaagattgctttaggatgctgacttctataaagatggctgacttactaggaaaccattttggaagtgaacaagtattcttttactatttgtgttgctttctcagattcaacgagaaggtgacaaatttaaggcctaggcccagaattgagataaattttaatcttttatttatttatttgagacaggatctcactctgacacccaggctggagtgtagtggtatgatctcagtacactgtggcctcgacctcctgggctcaggtcatcctcctacctcagcctctcaaagtgctgtgattacaggcatgagccactgcgtctggcataatcttttaaatctacagtctcatgccaaggggttctctgtctgaattcatgatttaatagactgtccaggtgtggtggctcctgcctataatcccagcactttgggaggccgaggtgggtggatcacttgaggccaggagttcgagaccagcctgaccaacatggtgaaaccgtgtctctactaaaaatacaaaattagccaggtgcagtggcaggtgcctgtaatcctagctacaaaggaggctgaggcaggagaattgcttgaacctgggaggcagaggttgcagtgagctgagatcacaccattgcactccagcctgggtgaaaagagcaaaactctgtctcaaaaaaaaaaaaaaaagatttaatagaccataatgactgagagctctgtatgaaatcaggccctttcctccactgacagaacagtaatggggatcaagagctaaagaaactgggtctctagatcagatcaattaaaagtggcaaggcacagttgtccattcaaacttccagcagcttcatggttcataaaagttgaacataaaacctgggagaccaaatactcttatacccttaagataaccacatgtattttatagtttagctcagattttagcagaaattgaaatgaaaactatggatttttccatataactctgaaatactggatctactaataatatctaggagttaaatactgcttttatttttattcttcttttccatacacatttattgagcctgttttcctcctacactctacatactatgttgagctctttggaggaaacaaatatgactcagatagggaccctgttctctgagagcttttaggaaacagcagatatgtaaagagccaaaacctaagtcaagacttgataaggacgatgaagaggtataagtaaaatgcatgggaaatgcataggggccagcaagcacttcctgggacaaacagggaaggcaataggaagatggcagtggaagtggtacaagaggctaaagaatagcctgagcaaaagcttgggcacagcaagggaggccggggactggcaagtaatccaatatgcctggagccaggactacatgccagactgtgaaggttctttctggaatcctgctgggctacagccctcatggtgcatccccacagtccgacactcaccagctcaccaggtaccccttctgatttggagtgatggcagcaggagcaggtttctgagaatggcaggtgtgtgggagatgcagctaaagggccagagggtgcctggagcacagctgggatgctaccaccaagcgtgagggcgtgccgctagtggaaggacacataattgcctaagggtgccatggttgtgtgtgctcctgtggacttgggtagaagagtataggactcagcagttttgggggcccagagtctctgcacccactcccaggccttcccacaagttaatttatgtttctcatgtgaagagtttccacttagagagtgaataaaagcaacagtggtatcatgaaaactatgctggtaaaaggcccctggacttggtcatttcaagggatactaagttacctcatcttttgcatttacccacaagttctattgatgctgtatctgagagatttcacatatatccccacttcaccacctccagtcattctgcctgacagtcaactttcacaatttctcttctggactcctctccatccttcacatcaccaatagaaagatatgtctaaaatgcaaatttgatcttatcaacttcctgcctaaaaatcttacaataaggtgttatccaaaatcttaacatgaggcccggcgcagtggctcacgcctgtaatcccagctgaggtgggcagatcatttgaggtcaggtgtttgagaccagcctggccaatatggtgaaactctgtctctactaaaaatacaaaaaattaagaaaatttttaaaaatcaaaatcttaatatgacataaggcttttctttaatctggcaaacttccctggataatccagaaccctttaagtctcatctgctcacattccactcttccacaggtactctagacttgtcaaattaattccacctccattaaatattctctcatttccatacctttatagataccattcagaaattctcactcaatagagtaggatggggctcaagaatatccttttctaactggaaccctgggtgatttccccccaagtgttggtggggcacactttacccactgaggaggacctccacctggatggccacaggccattgagatcctacttgtccaaaacggaatctatgtcctccttccctcgcagtccttcctatccacctaatcaacaaatcctgttgattcaaactcagaaatccctctcaaacccatccacatctctacatctccctgcatttaccctagttaagacatttatcatcttttggcttttttgctgtaatagcctcttaactatcttctgtgtccaagtttttgtcccaatccaatcaatcctttatactttattcagagtgatcaatataaactgaatcacgccacttccctgcagtcttccatttgttctcaggtgaaagttgaaacttttttctgcattcataaagccctgtatgatctagttcctacatactttccagcctcataagtcctagatcccttctgccatagagaattttttttttttttgagacagggtcttgcctagttgcccaggctggagtagagtggcatgatcatggctcactgcagcctctacttcctgggatctagcaatcctcctacctaagcctcctgagtagctaggactactggtgtgcaccaccacactggatatatatatatatatatatatatatatttttttttttttttttttttttttttttgtagagatggggtttcactacgttggccaggctggtcttgaactcctgcgctcaagtgatctgcctgccttgacctcctaaagtgttgggattacaggcgtgagccatcatgcttgatctgggatttttacttgtaacccaatgacacaggactgtaatgaaactattaatagataatgatcaacctcatcatttggccagtttctcttgaagcaaggctagccaataaaaactttgtatgaccatttaaacaaaacgaaacgaaaaacaaaaacaaacaaagcttccttcactcagaccatcctctctgccgatgaaagcccagcctgccatagaaaatcagataggcctctgagcctatgcacattttgttgttttgcctaaaacacttttctaccatctctttgcctggatgactatctcatacttgaagaatcactagaaatgtcactttctccgggagccctacctggactttgtctgtatgtgctcccgcagcgtatggagtttccccatcttagcattgttcttgtgtgtttctctacttccttcttgttgtcctcacaagagtacagcctgggaatgcaagccctgttttgtcccgcagtgctgcacatggtattcttcaggcagttttgctgaataaattaatgaatgcattcattcttacctgtacgacttctgctcttcctcagattcttcatgatcatctatctacctagtttccccagtcagagtggaaatttcatctctacttctttctcttccttacccaccacattcatttgttaggttctcatgagtctacattctatttttttttttggagatggagtcttgctctgtcattcaggctggagtgcagtggtgcgatctcagctcactgcaacctctgcctcccgggttcgagtgattctcctgcctcagcctcccaagtatcagggattacaggcacctgccaccacacctggctaatttttctaatttttagtagagacagggtttcaccatgttggccagactagtctcgaacttctgacctcgtgatccacctgcctcggcttcccaaagtgctgggattacaggcgtgagccacctcgcccggcctacattctaaatcttgcacaaatctgcccctttttttgttttccttcttgcctctaccttagtttaggccaccattatctcagcaatctctacttggtctccctgaccctaattttgccccctcaaatctattctttgcactacagctagaggaaagtttctcagtctctacactgttgacgtttctttgtcgtggtgatctgttgtgagcattgtaggatgtttagcagcacccctggcctctacccactggatcccaattgcaccctcccctcttcagttgtggaaaccaaaaatgttttctttttattgagatagggtcttgctctgttgcccaggctggagtgcagtggcacaatcacagctcactgaagcttgaccttctgggcttaagcaatcctcctgcctcagcctcctaagtagctagtactacaagtgtgtaccaccatgcctggctaattttttaatgttttgtagaggtgcagcctgactatgttgaccaggctaatttcaaactcttggcctcaagtgagtctcccgcctcagcctcccaaagtgttgagattacaggcggccaccacatctgacccaaaaatgttttcaaatgttgccaaatgtcctttgggtaacaaaatcaccgttggttgaaaaccattgaggtacagtaatctctctaaaatgaagacccaattatgtcacttctctgtttaaaaatcatcaatggatgcatgtacacacatggaaatatgccaaagggtagtgtttgtccagatgaactggctttgggtgattttatctgtcatgtgtataaaacaaggagaagagtggtattattttaaaagtattaatggttccccactgtctacaggaatgagtccaagctccttagtatggcattgctcatataaggcccgtgtgttgtggcctctgccaacctctcctgccccatcccttaacagccctcaccttgtactgggtcattgaacctcagtgacctagatgaattcctgccttctccactctctgcaccttggtttatgtcatttcttttgctgagtgcagcgtctggattcttaattgcctggcttagtcttatttgtttttcaaaaattagctctcttcttccaggaagggatcttgatcctctagtctgagttaagtggttctacatgttttcctggcaggaacatcatgtgtcaccatagtactcaccaccttctactgtaattgtcactgtacccagctgttacctatgcagctaggccacatggcatccctgtgtgaattctaaagggcactcctttctcaagaccccttcttgtcatttgctggaaattgccataagatgtgtacaaatccatgatggtcatgatgcaggtggcacatcctaaagttctgtggcgtgctgcctgcctgacctatgcagcaatatggtgttccctaccagaatataaaatcctccaggcagggactttgctttcatttcactgttttgtttccagcacttaacatagggtctgatccagagtgggacagaagcttgataaataaatgaaaggaaagctatcacctggcttttatcccccatgccaaaaattctgacagcccttaccagagtgggaggaagctaagctgcagcagttccgaaatttgaatgagcacccaaatattctggagaattaaaaataaataagtaaagctccctgtgccttacttcaaaagcaccaggttggagcctgattatgtgtcttcatttaacaattgttgatgagattctaataatgatcggtcagaccagctgggaaccataagccacccaggataaaacttaaaaccactcccctcgtcttgtttctccctcttgccaccacaatgctgccttttatctgtggacaccatgcctggaatcacagaaggagcatttccaaagaaggagcttgctttctctgacttctcctgcaatctaggtgtcttagattcccatgtcttccaactcagacataggcactcaactagcaacgagcaagagtacacagtggggcatttggaaggaggagggaggcaggtggagagaaggcgggtaacagagagagatcaagagacagagagaacaggaaaaaaaaagtgatctgcccttttaattttccaaaatagaatttgacctttttacttatgtaatctagaggttgcagctggactgtctgagccgtgtacgacctatgggtcaggcaaatttggacatgcctgagagtagctaggtggatccaccaaggctctttgcatctgaagggcaacgcatatcacttattcatagtagggagggcatcactggaataactgggggtctggaacaagaaaggaacaactatagattctgcttggcagctgagaagactgcatgtataagctgatgacgtacaccattggatgccctgtggaaggcatttgtgagattacgaagttactgaaattctatgttaggggctgagcacatgttacatgcactagataccctagaacaagatccgtgcaaacatgacttgcaggaagatgttgagggaaagctacatgtacatatgtatacttttcttggatttattggctaggaatgtatacattaaaacatgaatggaaaatatttttcttttttcctgtggttggaatggagccaatcatttacaaataggattaaaatcataacgggacagtttgggaagtgtatatgtttgagaagaggagcaaatcatatttgaggcagaagtggtaaatctttttgccttttttttttttttgaaacagggtttcactctgtcacccaggctggagtgcagcggctcaccgtaccctccacctcccaggctcaagtgatcctcctacctcaccctcccaagttgctgggactacaggctcgcaccaccatgtccagataatttatctttttggtagagatggggtttcaccatgttgctcaagctggtctcaaaattcctgggctcaagtgatccttctgccttgccctcccaaagtgccgggattacaggcgtgagccgtcatgactggcctttctttttggatttttacaaattcaccaagtctctgcgttcccatggctttttatctctgatattaggaaatcagagcttgaagataccatatacttttattggctgggccttaaagggaacaagtgaatctggtgaaatgatgaagtccatgttcttctggggagggttacctattatccagtgcatttctcagttagaaccaaagcttaaaagagagaagaaaagtttctgataagcacgttttaaagtgctgatcagaattctttcgccttgtattgattctttttctctgatttgcaaaagatcctctaaattgctttactgatttgttttccagaacactgagtgtgacagtcaagcccttgacggcttcagcaagtagaagcctgactgttgcctgcagaggatgactgtgtgtccctgggccattagtcagtccctcccagggtgctcgtaggtaaggaggaggtcctgaatcacagtccattttgcagattgattttctatttcagatcaacactgccaaagaaagttaggttctacctgagattatagagcccttcagaatgtatgacctgatttatatcacctgtcgtaatacaatgccccctttaataaacacttcttttcccacatataggattcatatccaaatatttaggtcacattcaaatttaaaaataaaaacgacatgcttttatatttcatcttctgaaacctcttaggagcaaaacccagtgcctttaattatattctgcaccagcagaattaataaatacttatcaatatcaataataacaagataaatgttaaatattcccatttatgttttgaaagtaaaacgtatttgaagatgacaagttctgaaaactgctaaacacacataaatatatttaaatgatgaaatttattttatttctgcatgttgtgtctatgtttcaattcttcctgttaaaagagagctgcaagtattttgatatctaagaaggacatttgctaaacagaatgttgcaagagttttaattttttccagtttggtctataaccgaaaaacatgatacccagaatgaagattatagatctatatcttctttgatccacctttgcaataatttgcaatatgagcttggaaataacttgcccatagaattaacagtttcctcaacttttcccagtttactgatattagatggttcagctatacaacattctgccttaaagaaaatcacctaagatacaaatgatatcacaaatcctagctataccacgcagtggaaatatttttttctccctcaaataaatatttactgggcaagaaacacttctcaattttaaatcccccaaatgtgagaatcactagtgtctcaaaaatttttacagagaaaaacgactcacctatttgaagagtatttccttgctagtgactctggtagctacagtcacataaatctacattgtggtctgctctttctttcatcagacaaaaacagcctcgggtgaaagctggaagtgaaaaaccctccattcacccaagaggggaggacagtggtctgttaaatccagcagcctcatcacacaacccaccagctgcttgctgcctcttgtttctcagcgacagtgacctccaacaccttttatttagtgctgcaatacaccgtgtggtttgacggcacgcggaacatatcacgtgccaagccaacaccttaagagggtgggaagctttgaaaccaggaagacatgccgaaaatatttagcagtcagctcaattgcacttaagcatagccttgcttgtttttcacaaagtaatccaacaacataatgagtcaagtgaactgatttgcacagttctaaactgggaaccatctggaactaagtttccactgctcctaaagcttctcctccctcaccttatacattctgagcaaacacatgggaacagccttcagtatttctagtaacagtaattacatttcctccctctgttttagaattctatttttctctagtctctttgttcatctcacattttctctcatctagtcgttaccccaactctccttatgaccaggacgtgaccaggacgtgaccaggacacatactctgcaaagaaggagtagtttttatttaaatatatcttcctggacaggacataggccagactcttggagcagtggaaaaactggcaatcattatttcccaatatttaacccatcactcaccaaatgcaccaccaatgcactctgcagctcgttagaagttggatttcaggtgagccacatttcatggtttcctaagaactttgtcactatgcaagttaagtcccatttcctttgttcttaataccaattgaattgaaattctaagaacaaacattaaacattttgaacacaaaacaggctgctggcctctgatatcggataacaaatgggccgtaacatgacctgagtttaactcaccctttctgtcccagtgatggaagctttgaagtctcctttccagatttcctgaatgagaacagggaagcaaatgacgatctgaagctcatccgggaagaaaaaggtgtcggctttttttgattagttacatttttagatcttgatgtaggtaattctatcggatctagaaaaaaaaattgtaaaaattttgcatcaattacttccaagtaaatatacttgaaagaatgaagcctttgctcttgtgtcactttctccctcttatgcagactagaaacagggcaggcaacctcacatgaagacctcagggattaaggcagtcagagcaacctctctcctgcgcctctgatggttctgctgcatagagaaaactcaaattagtagggaatctttccatgtgtactgtgaatcagagttcctagagtgttcctcctctcacccaagctaggaaatcagggaccccattcaattctcatgttccttaaccatgctgtccttcagaagtttttatttcagtaccttaaaaccatggtgatagatacatactacataacttcttatactgaagaaagtaaaggaaaaggaaattaagccatttagatttttcttcattcctttccaaaatctctctctgtggatatgtatttgctacacacatggtttacatatgtgtttgcatgtaacatatacagggtgagcatcctaaacccgaaaaacttgaaatcaaaaatttccccaaaatccaaaaaaatttgagcaccaacatgatgcttaaagaaaatgctcattgaagcctttcagatttgggatttttggatttgggatgctcaacttttcagcttatataatgcaaatatttcaggatctaaaaagatctgaaattggaaatacttatagtcccaaacatgtcagataacggatattcaacctgtttatgtataatatatatgtatagataatatatgggtatcaaaaattcaaaggcaacatcaacatatacaaaatccataatattggccaggcacggtagctcacgcctgtaatcccagtactttgggaggctgaggtgggcggtgcatcacctgagatcaagagttcgagaccagcctggccaacatggagaaaccccgtctctactaaaaatacaaaaaaattagccaggtgtggtggcgcacgcctgtaatcccagctactcaggaggctgaggcaggagaattgcttgaacccgggaggtagaggttgcaatgacctgagatcatgccactacactgcagcctgtgtgacagagtgagactccatctcaaaataaataaataaataaaattaaacaaaatccataatattataatgatttgggacatgctgactttataaatattaggggaatttaggacaagggaaaagtcatcagggtatgtatgggggtgatctaaaaaatctgaactgtgagtctttttacgtagatatgtttattatgagagttgcaagatattatcaacatagaagtttagaagtatttttacatgtttcatgatgttactaatgttaataacatgcaaaaatgcagtcaatgtgactccgcgtcagtaaaaagatattttattttagtattttatagtttctagtgcactttggttatcttctcaatagtcctgtgaaagcaagttttagtatccttttaatctatatagaaggcatttattagaagtcattcatggagtttaccaaagttccagaagtgtggcagctcctccaccaccttccctcccttctcctctgatctctgattctcccttcctccacccctcccctttttcttcctccccctgcatcatagtcatcccatttatttaagtgcttaccctgttccagcttaatattctattattttttttttatttgaggtgcagtcttaccgctgttgcccaggctggagtgcagtggcatgatctcagctcactgcaacctctgcctcccaggctcaaatgatcctcctgcctcagcctccagagtagctggggctacaggtgggcaccactatgtccagctaatcttttatttttctgtagagatgaggtttcgccatgttgcccaggctcgtctcaaactcctgagcttaagtgatcctcctgcctctgcctcccaaagtgctgggattgcaagtgtgagccacccccgaccccctgcccagcttaatacattataaacataattttacttaattctcgtaaccaccttatgaggtgtaggtatcattgcattcatttaaagatgaagcaactgaggtttacagagaataaatgacttggacagactcgcatgaatagagacagagtagagatttgaatccaggcctctgttgacatcagtgtctatattcctacccactatgctatcttgcctgattcaaaaaaacccaaaaaacaaaaaaaaatccaagacattattacagtaaaatttcagttcactttttttttttagtgtatattgtattataaacttttgtggcttatgactttaaaatagttctaaacatggattggttacattggagatccactgggccattatctacaatactatgccacagaaacaaagaaatcaactttaaatctaaaatctttttcttaccattttttgccatctccttacttagcctgtatgtaagtggttgttttaacatttggctaacatctgtttcattgcaaaacttttttctttgaatttcttcaaaccattcaccagtcactccctgaagccatctgatatccctctttgtcttctgaagtttgctgaaataaaataaaacattaatgtggtctttatttattttcttaacatcaagctcatccttaaatcaatgtactttttttttgatatgggggtctcattctgtcaccaggctggagtgcagtggcacaacctcgtctcactgcaaccttcacctcctgggctcaagcgatcctcccacctcagcttcccaagtagctgagaccacagacgcataccaccacacccagctaatttttttctatttttagtagagatggggtttcaccatgttgcccaggctggtctcgaactcctgagctcaagcgatctgcatgcctcagcctcccaaagtgctgggattacaggagtgagccacctggcccagcctcaatgcactctttaaattcattcacatctaaagccaatccatgtgatgggctaaacttgacttaatggaggagcagcataatctgtaagtctagaaaaaaaatggctctaatcagaatttccctttcaactatgcatgtattttaggtgtattcttttttttttttcttttttagtattcttgtaaatatgatggcaaactaaaagtttttgccagtagttaaaataatcatcaggctgatgaggacaacctggattaagcaatgtgctaaaacctgacctaataatgcaattaaatgatagatgttctaatgacacgcagaaactagaatattctcgttctgattactcattcattcacttgttaattcattaaatgtttgttgaacaatgttaatcaatttagtgtttatgagggcccaggtaggcaatggattcaacagtgaatgtaaaaaataggatacttgcttgtccatccagtggtcaaagataaaagctaacatgcagaaaagaaattattgaatgtaacaatcttattaatattatcattattttttgagacagagtctctctctgtcacccaggctggagcgcagtggtgtaatcttggctcactgcaacctccgcctcccgagttcaagtgattctcctgcctcagcctcctgagtagctgggattacaggagcccgccaccacacctggctagtttctgtatttttagtagagacggggttttgccatgttgaccaggctggtcttgaactcctgacctctagtgatccccctgccttgacctcccaaagtgctgggactacaggcatcagccaccgcaccctgcagaatataatggtcttagataatgaacttctttacacacaaaaacacaaaagcccatgagtgagcccaggtctaatgcaaaggtagtaagggatggggtaatttgagacggacagaaaagccatgcagcgcacaaatgtgtctgccccataatgtcagaacatgtggcctgaaatcctattacttttttttcttctctcctcccctttcctgcccaattctctttcaaatgaaaatgctgctttaagttcttaattaaatcactggttgttgtgatttattaatacttttttcaaagtagatcattttgctctatttaaggaagaccctagaactgtttggaaatgagaggtgcctaatccagagggagatgttcctggatggaggcaaaatgaacagaaagtggagtttgaagaatgatgacaaggcttacagtgtggttgtttttagatactgatgaaaaagttaggcatgttgttgggttccaaccttgggagattctgcagcttggaaaagtattccgtgtggctcagcagctgttatcctttgttcagggtctgtcgtaaagcacaagtgttagggtctttgtattgctaagggggtgatgagcaagatatctgtgaagtggcagatttggagttaaaaggcaatgaactgagatggctgcaactcaggctcttgcttggggctatgatactgctattttataaaatattcgagaaagaagccagaggtcaccctgcccagacttgcattttgcaaagcactagacagcaatcaacatgttcaacttacagaatttgcattggtgcctccttttttgccatttccaccctccgatgcgtggtactcctgtctttgttgctacttcatttattaacagagcagactcagagatcctaagtatctgcttctaaccaatattggctgcctctaacttatgaatgcctcacttactaatgccccacatttgtacacaacctccacttccttggagccctcgctaattgtcagttccccaaaagcaggcaccacccttttctgtttctgaaaacatcggtctcatttcaggagacagtcaagctacttgacttagaagtgttccatataaacaacattttcccccgtacaggcttgatgtaatattaactctctttttacaatttttatttatttctgcatttatttctagagacaacgtctcactctgttgcccagactggagtgcattggttcagttatagctcactgaagccttgacctcctaggctcaagtgatcctctggcctcagcctccccagtagctgggaccaccatccctgactaatttttgtaaagacagaatctcactctgttgcccaggcttgccttaaactcctggcctcaagcgatcctcccacttcagcccctcaaattgttgagattacaagcgtgagccacaatgccgagccctgactctcttttaaaaataatcacagttcacttaatcgtacctcaagctttccttccacggttgtgtacatatccaccactgcctgcttcttttctgtcttctggccaatgaagccagaaatctgtatttccctgaaagtactcaaacactttgaattccactccaggaaatttatcttacagcaataaccccaccccaagaacattaatttaactgagcatcatgtagttgctaacaataattatgtagacaacatagaatcctgggaaaatgcatatgacaaaacatgaagcaggaaaatgaaaatacaacatttatctatgattatagctatgtaaaaatgatcccccttttgggcacacacacacaaaaaatggaaaacacctgatgttttagagtagaataattataggtatcatttctatttttagcttattttattatttttcatttcattttagcttttttattatgtacaatatatggagctatctcttctttttgtttgattgtgaatttttatttgtgttgtcacttttccattattttttttttggagacagaaatcagtaatattatcataatctgaacacagccaatattactttttcagtgtgatttttctgctgcatttctcacacaattgtgataaaatatatccaggctgggcatggtggctcacaccagtaatcccagcacttcgggaggccgaggcaggatgattgcttgagtccaggaatttgagaccaacctgggcaacatggtgagaccctgtctctacaaaaaatttaaaagttagccaggcgtggttgcttgcacctgtggtcctagctacgtgggatgctgaggtatatatgtaatattcaatatacgtttgtggaaggccgcctatggtgcaaatgctggcatacaatggtaagcaaagcagatagggctcccaccctagagagattacagtctagtgggagagacagatatgaatccaataacaatattgatataaggtaacaaatagtgataaacatgacttattcactcagcacacatttgaaccctgggcaaagagcagtgaacaagtccctgccttcatgggatttaaattctgctggggtgggagtgtgtgtgggggggaaacaataaaaaagtaaataaggctgagtgtggttgctcttgtctgtaatcccagtgctttgggaagcaaggtgggaggatcaattgaggccaggagtgagagaccagcctggccaacatagcgaaaacccacttctacaaaaaattttaaaattagccaggtgtagtggtgtgctcctttagtcccaactgttcaggaggctgaggcaggaggatcccttgagcccaggagttggaggctacagtgacctaggatcataccactgcactccagcctgggcaacagagtgagattttgtctaaaaaaaaaaacaacagtaaatagctgctaagagagcatataacaaggggacctgggctgaggcaccaccagtgaagatttctctgagatgacatagggctggaagaatgaaggatgaaggatgaggccaaagggtcgtggcagaagggtctgagagagagctttccaggcagaggggtagcctctgtagagcaacaagtgccccaagggaagaagcaaggaacagaaataaggcctgtgtagctggagtgtggagatggagagaaagcccaagacaagcagagaggccactgttagataacgtagcattaggcgtagggttctgcaatttggtgtttggtcatggagcaatgattgatggctcagcagggataagacccgttggatttgcattttagaagatcatcctagctgcaggtggagagtagattccagtgcggggcaggagaccagtcaggacacttgtagggtctaaagaaagaggtgtttgctggaccaggatggtagtggggaagctggagaaaagtggaaagtgttcagggtgacttaaggtgaaaagtgacccccaggtgatgtgttttggggagtaggggtagagacacatcaaagaagattccaagacttctgatttacataagtgcctagaaggtgccacttacagatatcatgcatacataatctttaaaaacccaaaagttagcactgcaaaaacttaacattaccaaaactttaataacacctttaacatcactcatcttcagagcaatcattaagtatttgcataatattcaagctagtatgtttttcttcctttatttattactctcctaatccaggacattgagatttttctttataaatactgctttaaaaatactttataaatactgctgtaataaatatcattgtgcattttctattatttttttttttttctgtcacccaggctggagtacagtggcacaatctcggctcactgcaacctccgtctcccaggttcaagtgattctcctgcctcagcctcctgagtagctgggactacaggcacgtgccaccacgcccagctaatttttgtatttttagtagagacggggtttcaccatattggccaggctagtcttgaactcctgacctcgtgatccacctccctcggcctcccaaaatgctgggattataggtgtgagccactgcgcctggccatgcattttctatttttacagtgcctctgccagacactaaagtagaatgattgggtcaaagagtcaaaacatttttgtgattttttttaaagttaaattttattttttctagagacagggtctcactctgttttccaggctggagtgcagtggtgctatcatagctcactgcagcctcaaactcctgggttcaaatgatcctcctgcctcagcctcctgagtagctaggactacagttgcacgctactatgcccagctaatatttttattttttgtagagatggagatctctacaaaagtagagaggtctcactctgttgcccaggctggtctctcactcttggcctcaagtgatcctcccaccttggcctcccaaagtgctgggattacaggcatgaaccacggagcacagccctttttgtcattctttatacatactaccaaaataactgtaccaatatcacttatgccagcaatgtacaagtctgccactaggcatccttggaagacaaggtattattatttcaagtatttttatttttctaatattttggtgttactatttataattgttagtaattatttttaagaatctttctttgtttaataaaatatgttacatttctttgataagaggaaggtttgaacccttcccttatgtttgtttagtaattatactttgtgacttggcaattgagcgtttcgtcaatttttaaatcagtgtcttggctgggcgcagtagctcatgcctgtaatcccagcactttgggaggccaaggcaggtggatcacctgaggtcagtagttcaagaccagcctggccaacatggcgaaacaccatctctactaaaaatacaaaattagctgggcttggtggcgggtgcctgtaatcccagctactgaggaggctgaggcagaagaatcacttaaacccaggaggcggaggttgcagtgagccgagattgcaccactgcactccagcctgggcgacagagtgacacttcatctttaaaaaaaaaaaaaaaaaaaaaaaaaaatcagtgtctcagagttctttactggaataagaaatgtttaatttaaaaaccagctcatttttcttatgtgttttaaataagaaagtttttgacttttttttcttttttttgttatcttattgtgatgagattgactttcattttgattaaattttgaatgctgagctgtacaaacctgactctggctaaggctgttggaagtaaaacataaataatccatggatatgtttatgttagtatttgtttcctgaagatagtgagaaatgaaattcagacagtagtgtcatgcagatacatgaagggggcaagattttgaagaaattcaaatatttttaaagcagaaatattttaaggataactctggagatggctgtcaggaaagtgatgaacaggtacagtcatcagccagaatattcaaggttcaggtagtcgataatggcattatgtttactattaccaaggaagcaacacagaaatagttttgacctttgatgtaagggtgacccaggaagggaaacgatgacataaaagtctaaattcaaactctctgggtacgtgtaattcatcttcttaaccctacacacccaagagccctatgaagtatagtttgtacattgacaatggttaactgagcttctggtactaaaaggagcaaaacaattataaaatcagtggtctagattcattcatttacttaaaaaaactatcaaatacactcaacattagcaagtaagaaaaaattctaaacataaagtggaagtgtggtgacaaaacttgaggacagtactttctatttccactagcctcagtttgacaaagataacatttgtttgtaaacagaattcaaccaacttcataaccagcctgcacaacgctcttcctcttccatgtgggcttgttatatgttcagcaccaactgggatgtaccatccactttatgccaatgagaacctcagggttgagaatgacatacatacagggaaattactaatacacagcttgcttgcttaattagtccagcttgactcaacatatcacaagggactgttgtctacacttctaatttgttttaccctgaggctgatcaacttgattaaactaaatcaggtcttttcttgctaggccagaggcccagccctctgttccaagtcaaaatgtcctttcttcattcacatgaatccgtctgtgaaatgctgccttggatttcatcctagcacctctggaacacaccactcctcttatgttccgattcctgagttaaacttatttttcctttatttccagccttgagttatgacacccacctccccctcctcttctttgtctttcccaacttagtccttgctgacctttgcttgtcacttttgtttgactttattctgagcaaggctttgtgcccatcttttctccaggacaaattaattatgtactaaccatttagaacgtgctcagtaaatgatagctgtccatttatctcccggtcattgtgtgtaagtaatcctttggccccacttatctgctccttgttaatgataccctccctggcccattcttgagttactatcaggtaggagacagagcccaggagtagtgtcaggttctagctgggtgatcttggccaaatatttaactttcttggtttttctttccccacttgtcaaagaggaataaatgatgtgtagattgtttgcaaagaattcctccacaattcccatcattcctggaggtacactccttggcaatgtgactttttgccactcttaggaggtggggtctcttttacctctttcctagtggttgtaaggaaagtggatgaacaggtacagtcaacagctggaaaattcaaggttcgggtagtcagtgatggcattgtgtttactattaccaaggaagcaaaacagaaatagttctggcctttgaagtaagactgagccaggacaactactgttaagaggcacctcctttcacctcctcctggaatctgggccagacttgcacttgctaagaccaatagaatatggtggaagtgaaactgagacttctgagtccaggcctcaatggatcttatagcttctgctctcttcctcttgggatcttgagacttctgtataaggaagcttgggttagtctccttgaggatgagaccatacacagaaagaggcctggcagagagccattgccaactacccaacatgtgggtgaaggcatcttagaccatccagacccagccaagctgtcatagtggtgcccaatgagtgatccccggcaacccacccagctgagcccagaccaaatggctagcccacggaatggtaagctaataaacagaagtagttttaagcctttaaattttggggtgagactgggagcagtggctcacatctgaaatcccatcactttgggagaccgaggcagacggatcatttgaggccaggagttcgagaccagcctagctaacatggagaaatgctgtctctactaaaaatataaaaattagctgggcgtggtggtgcatgcttgtaatcccagctactcgggaggctgaggcaggagaattgcttgaacctgggaggcagaggttgcagtgagccaagattatgccactgcactccagcctgggcaacagagtgagacttcgtctcaaaaaataaataaataaataaataaaaaataaaaataaaatttggggtggttcgttatgtacaaattgaaaaaaacatggatacagatgaggttatcttgaagacatcttccagtctaaaatctatggtcagaaaagcctcaacattcctacatcacatccaaatcattgggaaatcttataaagccgaaagaggtctccagatataatctggccaaacaccctgtcttcgggtgaaatcataccaataaaaaataataaccgatgatatgaactgagctcttgccatctgccggattttgcagttcttattgccaatcctcaccctaacactgctccagcatcgtcctcatttacagagaggacatggaagttctgctggagctgccgaactgagacgcgaacccacacgcctctgagtctaaaacccatgttctcctaaccgtgtatctcattgtctgtgggtattattaaccccactaagaaacaatgcaattgatacaaacttacagtgacttttgccaattaaacaggcagtaatgagaattcaaatatgattgaagagagagcagttatgcaagtttgaaaacaaacaattccctaagccaggaatagcttccattttcttgtcagaaaaatctcaaatgtttctcagaatagttccctttatcagctcctcttgccaaaggcatccattcctctttttgatgttctcacttctctgtttatctcctctctgacatctctgacatttctccttcacttttcttactcccttgcttctgtatacacattgttttttttcttttacagctgatcttcgcggacctgaccgtcttgttacacctcgttctccttccaggcagctaagcaccccaatctctgtcaaccctccactccttaaggacatcttgccaaatagtcccttgatctcctacaagttcagccatcagccaaccccagaatgaagtttccaattacatcaaatcctgtgaaagtgactttgtcctttgatttgcagatcaaagcagtattaaagttttcctcccacgcaggaatccaaacataattttgtcatattgcccagcaaccacaacacaaggaaaagcacaaatggagaggatggggcaggaactgtatcccgagtcagagcttaaacgtcgggccagtgtcataatggaagacggatcaggatgtccaagcaagagccttttccaaaccctgaagccccaagagactcaccatctggggaaagtgtggccttttgttctcctactttagaaaggcgatacttccaggtaataggtttcttatcactcaccctccagggaaagctttaaaacaactgttgtgtgttcccaatcagaaagaggcagagtgaaggaagagaaagccctgtggttcagtggctgcaccagtagctttatcatccggggcctggtctctctccctgttgatcttctgaaaagattgttatttgagagcctttgtcgctgacatcagagcctgctctttggttcagcccacggccaagactcagggaggggcaaggattagaaaaagcaagcaagtatattgaaaaatgtgttcttttcataagggtaaagttaaatcatacacggaagtctgaaggaagggaagctcagataaggaaaagtggtaaactttataaagtaagcaagcaacaacaacagtaacagcaacagccctttaggactcaaagagaggcaacaaaataatggcaccagcttttaagccaagctggataataaagcccacttcaactccgtgaatggctgtgatagagactgcctactctacgataaaaagcaatattttctgtatttaaaaaattgaccattgtatggtagctcatgtctgtaatcccagagcctttgggaggccaaggtggaaggattacttgagcccaggagtttgagaccagcaacgtactgagactccgtctctacaaaaaaccccaaacaaacaaaactagctgggcttgctagtgtgtgcctgtaatcccaactattcaagagactgaggtgggagaatctgagctcaggaggtcaaggctgcagtgagctgagatcctgccactgcaatccagcctgggtgaaagaaaagaagaaaaaaggccgggtgcggtggctcatgcctgtaatcctagcactttgggagaccgaggtgggtggattacttgaggacaggagtttgaaaccagcctggccaacatggtgaaagcctgtctctacaaaaaatacaaaaaaattagccatgtgtaatggcaggtgcctgtaatcccagctacctggggaggctgaggcaggagaatcgcttgaactggggaggcagaggttgcagtgagccgagatcatgccactgcactccagcttgggcgacagagtgagactctatctaaaaaaaataaaataaaataaattgaccattgtaacccttctggatgtttcttttacaaaacacaaactcacaacagaaggaaaaggtaagttatctaagtaacaataaggatgtgtaattaccatctggttcagatcacagtgcccttggtctctcaccaatagtcaccctttaccaatagtcaccctcaagaaggtgctgtagaaaagacttgctgtccaccctgaggtcagacttagggtttaagtgtcagtccctcttgtagctcatcagagctcttctgttttcctaggtttacatgatccctttttgaatgtataccttttacctgagccagcttggaaatcacccactgtaacttctgtatttaccaaattacactgaataacttgtcatgtgcctatttggttgtgtcaccaggctgtcagctccttgaggacaggtgctgtgtctcatttgttttggtatccccagggcctagcatagtcccagactcatggtcgatcaacatatatttgctcaatctaggggataataaatgagttctaccaacttattctgccatcattgcgaagcagttcagttgctatttgacataagtgcaagatgtgatcctgtacacaaattaaaatcatgtgtgtaaaaagtaatttttccataggaataatactggaaagctaatcatagctaacagttacagagtgcttgccctgggccaggcacgttacacgtattaactaatttaatcttcacaagaacccttatgaaggtagataatattatccctattttaccaatgaagaaattaaaatactgagaggctaaattgaaatcagacttcctgggatgaatgtggcccctgacctttttttttttttttttggtgacagggtcttgctctgttgcacaggctggagtgcagtggtgtgatctcagctcactgcaacctctgcctcctgggttcaagtgattctcctgcctcagcctcctgagtagctgggattacaggcatgtgccaccacgcccagctaatttttgtagagatggtgtttcgccatgttggccaggctggtcttgaactcctggcctcaagtgatcctcccgcctcagcctcccaaagtgctgggattacagatgtgagccaccatgcccagccgccctgaactttattaactgggtgtgattttaacctctctgtgccttagtttgcacatttgtaaagtggggataagagtaataatatctcctggagcttttgtgaggactactggagttaatgcatgtaatgcatgttcctggaacaaatgaaacactgtcattgtgacctgtgaaatgtgcaggatgggtggtaaaggtggtggagggataatggggttgggggtgggaattatgtatcaccactcccaacacaaaagagatctatggtagtaaagagaatcatggccaggcacagtggctcgggcctgtaatcccagcacttagggaggccaaggtaggtgaatcacttgatgtcaggagtttgagactggcttggccaacatggtgaaaccccctatctactaaagatacaaaaaaattagccgggcgtggtggcgcactcctgtagtcccaggtacttggctggctgaggcaggagaatcacttgaagccaacaggcagaggttgcagtgagccaagatcgtgccactgcactccagccttgggtgacagagtgagaccctgtctccccccggcctccaaaaaagagagggaatcatcctcagatttccttatcctgtaaagaaactcaaaagcatcagctatttggcaaacgcccaacagatccactcccagatttctatgtcgtacttaaatcacagcatgatcatgagaaaagaaactgcagggcagatgttcacaaacacagcttagatggcaagctcaagacaagaggagtgcactgggcaaggctccgcctgtcatcacccggctagctctcacactgcactgaatgcactggctgatgccatggtttaggccacataattgcaagaatattgcatgtactttattaaaatgtctaaaaacacatactattccaaatctgaataaggcatactattccagcatacatgaatagcttatacttttatttatcttaaacctggattctagtctaatttcagaaaataaccatttattgattcaactaacatttattgagcatttactatatatcatacactgttctagcagcttggaatacattagtgtacaaaagagacaaagattctcacctttctggagcttgcagtctagcaagtatctccatagccacctccctggcccaagtcaccaccatctttcacctggatgtctgcaggagccctgacatggtttggttgtgtccccacccaaaatctcatcttgaattgtattctgaattgtaatccccacgtgttgggggtgggacctcgtgggaggtgattagatcatgggggcggtttccctatgctgttctcatgatagtgaatgagttctcaggagatcttatggttttataaggggtttatctcacttcactcggcacttctctctcctgccgccatgtgaaaaaggatgtgtttgctttcccttcccattatatttgtaagtttcctgaggcctccccagccatgcgtaactgtgagtcaatcaaatctctttcctttataaattacccagtctcaggtatgctttcatagcagcgtgagaacggacgtatacaagcccctatctgtctccctgcttcactctggctccccttccatccaggctccatacaggagcaagagcgatggccaaagaacaaaattccaacaaaatgagttttaaagatctaattggcatttattagtgattcatgaattgagtagcatcttgcctggcagaacaatgggtttttacaagatagcttgagcaggaacaataaagcagcataatacaaaaaagtggactgattaacatcaggctacctcaggatactttccttgtaagggttaaagcaggggaaccttccttatcatgcgggtgttgcctgggccctttgcgattagttgtgaatctgctgtcttttttttttttggaaaagctggactgtttggggatttgcctgtttttgttttttaagtttcagtttgatcatgtggcacttaagagtgtttccattttggtgtgatctattgggacctactacaggagaaggtcagtaccagacagtggcatcccatcaattttattttttgttttgttttgttttgtttttgtttgttttgagatggagtcttgctctgtcacctagactggagtgcagtggcccaatcttggctcaccgcaacctctgcctcctaggttcaagcgattctcctgcctcagcctcccgagtagctgggattacagtaggcatgcacaaccacgcccagctaattttgtatttttagtagagatggggttttgccatgttggccaggctggtctcgaactcctggcctcaagtgatctgcctgccttggcctcccaaagtgctggggttacaggctgagtcatcaggcctggcccccatcaattttattgaacatgattttttgtaaatgtaagatatatcatgccatcccctgcttaaatccctccagcagcttctcatcatgcttagaatacaatgttaaactctgtggtcttcaaggctgcatagtgtctgaccttctgccttttctaccacttttaatcactcctctttcctctccactcagcatttggcttcttttttccctcttaacaggccaagctggctcccactgggcttcagacttgttccctccatctgaaatgctcttccctattttgtcacatggctatgcctttgtgccatttaggccttagctaaaatgtcacatctttagagaggccctctggccctccaaaatagattattccttctcccatattcagttactttctatcaagttacttggtttacttttcttttttttgtttgtttgtttgcttgttttgagatggagtcttgttctgtcacccaggctggagtgtttccagaaaacaagacagacaatgtcctcatgcttgtagattgtattttaatggggtacaagagatataatcaataagaaagtaaataagtgaagaaatttcaaaagaagattaacaagattaagaaaagaaaagtaaaccatgatctcggctgattgcaacctccgcctcctgggttcagggaattctcgtgtctcagcctccctagcatagctgggattccaggcgcctgccaccacatctggctaattattttgtaattttagtggatacggggttttggcatcttggccaggctggtcttgaactcctgacctcaagtgattcgttctcctcagcctcccgaagtgctgggattacaggcacgagccactgcgcctggccctggtttacttttcttaatcctgttaatcttcttttgaaattatcctcttcacttatttactttcttattgattatatctcttgtagcccattaaaacataaactacaagcatgaggacgttgcctgtgttgttttctggaaagatgtctgacttagggtatggactcagttagctcttggtgaacaagttaatgaatatgagtttgggaaattcccttttctctggacctgcatttcttcacccacaaaattagggggttgaactagaggctatcaaggatgctttcccactttttattttttattttttttgagatggagtctcactctgtcacccaggctggggtgcagtggcataatctcagctcactgcaacctctgcctcccaggctcaagcaattctcctgcttcggcctcctgagtagctgggaatacaggtgcccaccaccatatccagctaatttttgtatttttaatagagatggggtttcaccatgttgtccaggctggtcttgaactcctgacctcaagtgatccccttgcctcagactctcagagtgcttggattacaggtgtcagccactgcgcccagctcccactttttaaactttattttattttattacagacagggtctcactatgttgccctggctagccttgaacctccaagctcaagctatcctctgccttagcctcccaagtagctgggactacaggcacatgccatcgcatcagacttcccactttttgtgattctaagtacacttttgctaaggttgcaaagggtatgccccactatttaagaatgtggtcaacaagtccatgtttagctcagatctcatggtttctaactctgtctcccttgggcctctgtatttcagcctgggaagtcccagtctggtatattgtcctcttgtgtctgctgtcctttctttcactttctttgaactttctgttgctcctgtctggatccattacatgattaaaatgaaatgaacagaaaaggacacatgattccagattccaactgacaataactttatagaaaatgaaggcaatatttggtatcatttctagtaccttcatgctgctgctgaaggtgatgggaacctgcacactgtaaacatatattgtttctggaggcggaaagtttacactggtaaacacacttcatgtgacagctatgatgctgggcgcttccacctagattatttcatttaatcactacaggaatccagtgaagtaggtattgtactcattttacagtaaaaggagctgaagtcacgaaaggtgaaaacacttgccagaggttgtaaagtggtgagtgaaagaattaagcttgtacctagctcagacccccctcaccccaccagcatgatgataatcgttgagtaagaacagttatttccagattatttccaggagcctgatttattcaacccatgcctagaataaacctcctctcttgagtctctgtactttttttgcatgctggttgtctcatcactggattgtcagctccccaagtcaagtgtcgatttcctgaacacacagcaagcagggaagaaatatttgttgaataaccgaaaaaatgaatacaagagaatgaaaaactagattttagcttttgcgtccctcttattcccctttatacagatgctcagacatcttccactgaaacttgtaggacaagggttaatggcaagttgagtgtcaggattctaaaagtgcaagaaagctgctcggagctgcagaatggggacataaatgcctcttgcaagtctggtatactagcacagctgcaaagcaggttagaaccatgaaggttttcatccatagacagagtgtatgatctcaacgtcttgaatttgttaattatattgttcatggcttctttccaaagacaactacatccttaattctgaccacatcctctgcactgctagttatgtagagttaggtaacaagatagaatggtacacatgaatatgcatctctccttcattttcattaataagaatgcagaacatctttttttcccctcatattcaggcaatttaattcttattcttggaatctgtcttgttaggaaaagaagacagaaagagcagcctatgctatttcataaagttaaaggaaagtgatgctcctatagatcccttctgtgtctaagcaaaaaggtgacaagatgacattactttcacttctcatactgtaattaaaatccactattattgcattcaacttaattcaccctttgtatcatgcagttttaagggtgttgggaaaccaactcaaatccaacattctggactttgctttaactttaaggaatttaatgttgcaatatgagactctcaccaccctccttcccaccctacccacacacactagtcaaatatgcaagccagacgaaagaacgatagatctcaaatagctattcaatctttgtgttaggatgcagaaagctgaggaaatgcctggaggttttctaaatgtcagcaccatgaatctactgctcttggttcccatcagggatagtggaggttcagagagtccatgactctcaaaccacatctgcttcaggattccctcactgggtcaaaggaagcttgttgttgacatcagttaaagctcattggtttggattacagtttacttattttcaaagagttaacttttgaaataacccttttccacatgattgctgccttttccaattcctctctggcaaacaaacccgccttacaaagatgagtgtggcattgaaaccctttttatccatctactgataaaccaactgacctgacaaaccactccacctcatcagaaattactgcagaatcacacgccaaagggctttaactttgagcattcctcttgaatccttgcactaaaggttatcattagaatgattattctgcctcggtgattcaaaacacacatattgttttcatatggtattatctcatccagaagaccttgttaagttttgtctgtagatgtagtcacatttatttaccaaaacatactcctgagaaccactcctggaataattatagaacaaaatctgtacttgggggtaaaatgaaatactgccagcagtacaaacgcaagtgtctactccaaattatgtaacttatttatggaagtttgattttgtgtaaaagatatttttctggtaatgtcattgttatatgttcttattattcactatcattttaactttcagattctagtatctaaattcctctttctcaatctcaataataaagtttgtgatcattccctatcatgtattaaataatttatcatgaaatcttaatgagtttttggagagaaggcctaaaagaagctttgttacatgatataaataataatataactaacattggaggacattatgcattttaaataaatgtgtctcagtgcatcaagaataggtacaaaataattgaactcagtctgtaaacaatcagcctatttcccaaaaatgaaaagacatgtcaatgcaaagaagcagtagtgccaggtgtgctttatagaaggaaagaactgtttatttggtatatgtttatggttgtagcctattatttattaataatgatcttagattttaaaagacatcaactatttagctttgattccctttgacattattggcatagaaaaagaaatctggatatctgattccctccatcttgttttgttttgttttgttttgttttaaatcattctggcatctctattctctttgccaacacccaaaaatagcactcgatcaagccacagaagtaatgaattaagcatggtggtagatctgtctgaaagatgtggaccacttttctagcaaacaggtatcccatgaagtgttgggagtctgtcctactcatagtaaagtggtcatgggtagttcctgtgctttgcctcgtgggatccaacattttttgcattcctaccctaatcacccaaaagctaaacatgagcaagaatgctgcccagtgaattctatttgttctattttggagagtgattaacaacttaataacgtctttcctcttggcatgtcttaaaatcataatgccaagtaagacaaactaaagtgacatggctaagagacacatagcgagaaggtattgagcagtaccatgaagagaagccatcaggcaccagagtcttgaacaggaggaagctatggggcagagaggaaacttgcaagaagaaaatcagccctggcaatggaagtgagtagggagaagcagaacagagaagctggaccacaagcctgtggttactagcctggttgattgattggcaccagaatgctgcagtattctgatcaacattccggttcctgaggactggccgtgcagggttgaggccgtttcctgtgtttccttacttctccattagatcctgacaataaagtgccacccatcccttgaggaaactgctctatgttccttgtcacctgaaagaacataatgaaaacatccagccataagcagcatgtaggaatttgttcacagaggaattctccagcattgattgggacaggaaatttcaaatgtcaataaaactgactttgctttgccattatacaattttttctgtgtttttttttttttttttttgtaattgtgaaagtaaaattacatcaggccgggctgggtggctcacgcctataatcgcagcactttgggaggtcgaggtggtggatcacttgaggtcaggagtttgagaccagcctagccaacatggagaaacccgttctctactaaacaacaacaaaaaaaaagaatacaaaaattagctgggtatgctggtgcatacctgtagtcccagctactagagaggctgaggtggaagaattgcttgaatctgggagggagaggttgcagtgagctgagatcgcaccactgcactccagacttggcagcagagcaagacgctgtttcaaaaaaagaaagaaagaaagtaaaattacattcaatgcaaaagacttggaaattaaagaaaaaacttgaaggggccgggcatggtggctcacacctgtaatcccaacactttgggaggccgaggcaggaggatcaagtgagcccaggagttcaaggccagcctgggcaacatggtgagatcctgtctccatttaaaacaaacaaacaaacaaaaacttgaataaaagaaatcactcataactcccactgtcagagatactgctgtgtgtgtacatatgttcattcatgtgttttaaagcagtagtcacaggactaggactctgactcagttttagctaaagcatgaaagcaagagattcaagacatctaagggagttgtgagaagaccaatcaggagaacttgctttgtgggatttttaaaaacaaacaaaagccaaatctctctagttagggtttaagtccccttacatgcattgacttggaagagtgaagacagagggaggatctgtgaggaggctttctctagagccagggagcttaactggtacgactggaagagcttaattttgtcccttgtggtttggaggaaaggtagactggtatctgcctcctgcctgagaaatttgagctggagaaactggggcctgccagttgctttgactgcagaatgaagtgcatagctcagctgtcaatcagccctcatttccagggtttctcaagcaaccacagtatgactgtgtcccgtggagaagatgtgggccccaggagaggctgaggaggcatggggttctcttagttcatgcctgctagagtcagctccaggggtgaataaacctgagtagaaagaggttgtgggtgaacccctggattcctagcacagagcaggggagagcacattatctgcatggaaagagctgctggggaacagtgccgggccacgggccatctcagcaaaccccagacgagcacacaagagaagaggcagatttaaacatctgccctacccagagagagtgatgccacctcacaaccattctagtcaagcaacagcttttctgcatgtgccttccatccaaacttaaacctgcctcccagccaccgtccggttcaaccctggaacagtaaaaaaccaccactgaaggggtggagaggcagaggttgatggggaaagggaaaaggatcaaatcctcttcactgtcctaggcgtcgctctgcagcaagcggtggctgtgtgaggggctgctcctctgaataaagctgggattaatctaggaccgtatgttctaattatctctgaattgagactgtgtttgtgtcttaaagtgaccagaaaagtcaagggactgcctttgtttgtatccagtggcatttaaagggatagtaggagacggctgcacacggtggctcatgcctgtaatcctagaactttgggaggctgaggcggacggatcacttgaggtcaggagttcgaggtcagcctggccaacatggtgaaaccctgtctctactaaaaatacaaaaaaaaataaattagctgggcatggtggtgggcatctgtaaccccagttattcaggaggctgaggcaggagaatcgcttgaacccaggaggcagaggttgcagtgagctgagatcgcaccactacactccagcctgggtgacagaacaagacggtctaaaaaaataaaaaagaaataaaaggatagtaagagacaaaactaaagatgttttcttgttatattccatgattcctacttgctccacatgtcagttatgtatgcctgcattttcaaaaaatgctcttaccctatgcatgctttgtgtagtctatgtttcccacttagcattacattaagaatgctatgctatgtcagtattccaccactgcatctctgtactgtaacatatgatcctactcccctctcgttggagttatttctaattttttagagtcataatgttgaaataaacccagttcaaaactagcattgtgcccatctctgattaattccttagaatcaatttccttgatgtggaattgccaggccaaaggatgaacatgttttaatgacttatgaactatatcacaccaaattaccctggaaaaaggttgtatcaaattttcccttgtatgacggtccatttccccatgtgcttgccaatgttagttatgtctattctttttgatctttgctaatatgataagccaaaaaaagttttctttttttttctttgtatttctttgattactagagaggttgaacattatttattatgtttattggatatgtgtagcttttttttttttttttttaagatggagtctcactctgtctcactcaggctggagtgcagtggtgagatctcagctcactgcaacctccgcctcccgggttgaagctattctcctgcctcggcctcccgagtagctgggatcacaggcacccaccaccacgcctggctaatttttgtatttttagtagagatggggtttcatcatgttggccaggctggtgtcaaactcctgacctcaggtgatccgcccacctccacctcccaaagtgccgggattacaagcatgagccaccatgcctggcctgtagtttttgataacttatctgctcaatacctttgctgattattttagcccaggtaccatttaaaatattggttctatgaaatccaaggtaaagagccaagcaaatggcaaaattggcaactcttggcatttgcttcagagtgtaattcacaggctagtctatttcacactaactggggactcagattggccactacagcacaccacagatcagtgctgaatgttgtcttcaacacacctaagcttcttggttgtttgcttcctattgctcttgcctttcttcaagttgcacgatcactacaaagagaggaataatgtggccgaaccacacagacattagtgtcatagacactctctgtcactctcttcatcttttcccagccaattgccctgggaattggcatggtagcataaaatcactgtccgagcttacgtgagggtgctgggcctgtggtgtggataatcaggtgaggggttctaattcctttattatttgggctgatcaaatgacatctatgtgtctcatcttcctcatctgtaaagctcagttctttgtcaccagccccatgcttacctatctggacttctttcctatgactccgtcatttaaacccagggtgccaaccattccaagcactttgccatgctctctaggcaactttccaactttctcttttgtttacaatgccctttctacatattctttgtcacacgatctaacttgtgctggcacttagctaaagggttgaaaaacgccttttcaagtgaggaaaaaaaatccaattcaaccataatgagcacttaaatgtgtaaggatgatatgaagacactaggaaattcaggatctattggtggaaaaagatatgtacaaagtagctatgatacaacacaggacatggttgataatataatattaatagaaaatcaagattcttgctttagcattatgaagaaggataagattaattctagctaaaggctaggaaagaattcatgaagacaggccttaaaagacaatcggaactagacttgctggggaataaactccactaaggctgggtctgaatccattattgttcatcatgagtgatactcattccccaatggatgagtggataatatggaaagtaggtaaggtgtgcatggaggggggtggtggggaataaatgggtgaaggctttcataggcagactttccttctgagtgaaggaagctttgtttttgttttgtttgttttaagtggttacaaagtttttatttgctggccttgcatcaagagaaactgaccaaatgatgaggttgattattatctattaatagttttattacagtcttgtgtcactgggttataaataagaattccaggccgagcatggtggctcatgcctataattctagcattttgggaggccgaggtgggaggattgcctgagtctaggagttcaagaatggcctgggcaacatggcaaaaccccatctctaaaataaataaataaataaataaataatcccagcccctctgaaattctctcattttctttgatagatgcatagaagaggactcaatactaggatcatgcaagtcttctggaggcttcctatgctctcatgtaaagaacaagacttggaggggaaactaaagatttccttttgtggtcttttgccggtcactcaacacagatagcaccaacacaccactgcgttgtcactccctgacacaacctattcagctgagagacagagctagggagaaaggggccacaaaaccctttaacacagatttaacttctatttttatcagaaatgatttcatgcctctcttctatttaacatttacagaattctaaaacaaaaacagttaacttaaatctcactctctatgtgcaaggttgttaaaaattagtgaacatttagtagaagttactgatggtgaacagactgctaaggaagggaagagaaggaagtcaagtgggatgaaatctgacaagccagagtttacccacaataaacaaacaccagccttctttaggactttagtttccaatattgatatgaacagtctttctgaattgaagatttacgtattccaactcctgattatagcacaataaatgtgttatgtagaattggtttaatggaagcattaagccataattgggagtcattctcctttacctacctcccacttatccacctgccacttcaatgccagcctctatgaagttttgcctaataattttagctccaatccatctttctcttctccaaaaccctacctcactgctgtccatgccaccccttaagtacttagtcatgcgtagccttatattcttgtttgaattctcatgtcctgtcctcccaaacagattatacatttcttgggtcccatactttgcatttaccatagcagatttcatagcccatacaaacattaggccttcaaaatatttgtcaagtatttcttcaataaaaatgaaaacatcccaaatcttgatcccctaaatgttaaatgggacttagttaagcaaactaacatcatgatatactggaaacaggtatctctttcctttacccttgtgcctgctgaagatcttattctcagccttgctgttttaaactcaggggtgtgtgtacaacatatttaagcaaattctggaataccaaagccaagcagtcttccaggggcttcatcctggcacacagcagcttacctggtgggtgttgggtagcacacagtagaatggccgctttgtctctcttgagtgactctggacaagcttcaaaaccaaaatccacagtgccctatcctggtgggcagaatacactgaagacagggggtttccgactcgctgaagacaaaacacccttctgctgaccccgtaccaaaggggagggtgccggtgaaagccagcttgttactgcttcagggaggagaagcagttactgaaataaagtgtcttactttttttgggagggggggagggcgtctcaataatcagttggccttaattatttttgcttagaataggagagataaagctcctgactgaagtccaaagctgcaggggaggaaatgaccaggcacgcgggttcctctggctcgctgggcacctgctgcctggcaggctgctcaccatggctggccggcgtggtggttcctgagaaccaatcggttcccccctctactgtcaggtggctgctctcagcttctctcccagaagtccttcaccaggccatctggagccgaggaacaagttccaagttctcttggccagaattctgctttgaaatctgtccacacctccccccaacccccagtcttggtcacaggcctaaaatttgacctcaatcgctgagaaataatgtacaacaagagatctgcctttaaatatttcaaagttgatggaagagttgatgtcctttagtattcagatatattaccttaccctggaatcacaaagtatagagtccacttggacccactcgtttcagcagtaggtcaaatgccataaactcatcaaagccagaaacctgagttcatatgagctctcctttctccttcctcctgcagccagtcagccaccaagccctgctaattcgactttccaaatatttattaaatcacttgccttctcttcctccctaatcgaggcccctaaacacaattcttccctaatccaggcttcactcaccacccatggccatccacctaatttgacctggtcattcagtgactctaaacatttcagtggctcctcctcccctccagttttgtcaagctcaggggcctcggctcagcacacaggtccacgtcccaccctgccaccccagctcactcttttgcttgtggcttcctctcacgttgcactctggtgacattcactacgatggtgtctgcatctccctgtagtctttcacatctttatggcttgcctaatgttgttcactccacttgctgttcacttcacctttattcacctgttacctccttcaagactcagttcaggcaccaccacctccagcaagtcttctttgagacttcccatgaagttaaattacctctgcggccctctgtgtgactatcttatcattcgtcacgttatagtgaatgtactatttctatttatttattattattttcttattttttggagacagagcctctctctgtcacgcaagctggagtgcaatggtgtgatctcagctcactgcaacctccgcctcctaggttcaagcgattctcctgcttcagcctcccgagtagctgagattgcaggcacacgccaccatgcctggctaatttttgtattttgagtagagacaggggtttcaccatgttggccaggctggtctcgaactcctcacctcgtgatccgccctcttcagcctccaaaaatgctgggattataggcgtgagccactgctcctggcctgaatgtactgtttttaaacccacctccttcacggcattgaaagcttacaaagaacatttgtatatctccggtaccaggttcacagtaggatctcaaatatatctgctaaataagtgagtgctgttgaacagaaatgttattgaatcatgatatggaaaaaaaaatctatggggctctcactttacagaggaacacggaggtgcctagacctctgactcctgatgctgtgaggcactggcaggagggtcttgggacagtgacagtttccaaagacaactgcctcaatgctgcaaatggaggagcttatcatacccggcagctccaagaaaaaggtaaaattgcagtgctactcccaatgcttaatgttgatggttgacctgcaatcaaaaactccaaatgactgtctaccttccagaaaggaaagcagatctgagccaagagagtaactagggcctggcctgcctcctgaaatggcccaggcccctggaggtatggaatcttccagctttaggagactgccacctgtgagtgtctgcagcacctcagagatgaagttcaggtaagctgagaacagaatagcatttttaatttttattattttaaaaaataaaaaaaattattttttatttttttgagatggagtctcattctgtctcccaggctggagtgcagtggtacaatcttggctcactgcaacctccgcctcctgggttcaagcaattctcctgccttagcctcctgagtagctgggatcacaggcacatgccaccatgcccagctaagttttgtatttttagtagagatggggtttcattatgttggccaggctggtctcaaactcctgaccttaagtgattttcctgcctcagcctcctaaagtgctgggattacaggtgtgagccactgcgcctagcttatttttaagagataagatctcactctgttgctcgggctgcagtgcagtggcgtggtcagctcactgcaatttcaaactcctgtgctcaagcgattctgccacctcagcctcttaaacagctggaactacaggcatgtgccaccatgtccggctaatttttaaattattctgcagagatgggggtctcgctacgttgttcaggctggtcttgaactcctggcttcaagtgatcctcctaccttgacctcccaaagtgttgggattactggcatgagccaccaaaaagtattatcactttaataataaaactatcattgttttggagaactgtttggaaattgtggcatttacaatatttgtgaggtgggttttagacacgtgcaagttgtttttaagaaaagatttacatttatgtattgttttgtgactgtgaactctccttaaggctctggaaggcccaggacaaggtgttataagctgacacatgggggaaatgaaaggaagtctaaggaagaagctggagcctcagctcggtggaactgggaatacaaagagctgggtagagctgtctgagggtgaggcctggtgtggctttgaaggtggagacagctaccctggagggagtgtgttactcataaaccttttaaagacttgcctggatggtagaggcaaagcaattacacaaccgtggatagacatgacctaatttattggccttcccagttacctactgtggagccagtgctataccataacccacaactaagaatgaattttggtggagtgaggaggggtgttgctgagaataggggagaaactgatgtccttaaggaggaagaggcactgggaaacagaccagagtgcagagaggtggacagactctccttgatgcactccccatggagaaggccattgtcagaattccgcctgctttttctactctgaggagtgaagagctttttttactctgaggcgtgaagcccttaataccaccacttagaggacgactttgggcaaacagagctctcacttggcccctggtaatgctgaaggggagctcccaagggcaaactcgagtgcaaatgtagtaattcagccagcaactgagacctcccctcaaatatgtacaatcccaaaagtcattttcagacacctttttgacatctgaagaagggaaccacacataaaatacatgacagcaatgtttaaaatagtcattgaacaggctggggcggtggctcacgcttgtaatcccagcactttgggaggccaaggcgggcggatcatgaggtcaggagatcgagaccacagtgaaaccctgtttctactaaaaatacaaaaaattagccaggcgtggtggcgggcgcctgtagtcccagctactcggagaggctgaggcaggaaaaaaggcgtgaacccgggaggcggagcttgcagttagccgagatagcaccactgcactccagcctgggtgacagagcgagactctgtctccaaaaaaaaaaaaggcattgaacataactgctcagtttgagccaatgtgagcaactacagtggagttcaaagaagccagttcacaaggccaggatctaaccagcttgtgggcacgacagcatttgtgtttatgcataacctacaccaagtgcgcagtgaaacaaaaccaaaacaaccaaaagtaaaaagtgattctttacagttgcctgactaaatagctccggggcagaagaaccctttgatcctgccaagcagttttaaagcagcaaagtactccacacgtttactcactgtcccctgactggtttctctgctgctttttatctctgtggaaccaatctactgcatcactttctgttttcctagttggaccctgactgatgtgcagacaatgatctcctaaggatccttaccagcccacctgtgagtggaaacattaaattcacaacatgtgaggttcttattttgtttgctttcttgtctagcaatttttatttttagttttagttattgatttatttattttgagacagagttttcctcttgttgcccaagctgcagtgcaatggcgtgatctcagctcactgcaacctttgcctcccaggttcaagcgattctcctgcctcagcctcccgaatagctggggttacaggcacctgccaccatgcccagctaatttttgtatttttagtagagatggggtttcaccatgttggccaggctggtcttgaactcctgaccttaggtgatccactcgtctcggcctcctaaagtgctgggatgacaggcatgagccactgcacccaggcccatgtctagtaatactgttagtcatttacctctgcaattaagtaatttttgaagtaaattaattttgatacaagttaaaaaacgggctgctcgtgtctgtaatcctagcagtctgggaggacgaggcaggaggattgcttgagcccaggagtttgagaccagtctgaataatatagagagaacttgtctcaaaaaaatgttgaaaaaaataagagagagagagagagagaaaggaaggaaggagagaaagaaagaaaaagaaaagaaggaaggaaagaaggaaagaaagaaagaaagaaagaaagaaagaaagaaagaaagaaagaaagaaagaaagaaaaagaaagaaagaaagaaagaaagggaaagcaaaccagcaaggaagcaagcaagcaagcgagggagaaagaaaaggagtctaccaccctaccagggtactgatttgaccagcaaaacaaccagatctaaatgacaatcagtccacttgatggagacctcatgatgaatggtctacccttggttgggtttgccacctgacgtagaaaatgggaagaggaaaaaaactgaaacacaattaatgaactatgtatgttgtataggtataacaacaatcacacttctctgtatgaaagctgtgttttcccctgtgatttccttctgagattttatacaaactggtgctatagcatttcgcctcatcaactctttgtggttatttggttgctacagtcttttccctaaagggaattatcaagggcctcagaaggagatggaaatcaatggtactatgacaatttgccaactatttgaaaaaaataaatttatataatcctaacttatagacaaaatatatgtcaggtgaataaaaaagttacattaaaaattaagacgaagtgaatattactctaatctctagatgagaagagtattctcatcttaaaaacaaaaggtgaagcaggaggatcacttgaggccaggggtttgagaccaatgtaggcaacatagtgagaccttgtctttacaaaaagattttattttatttatttatttatttatttttgagacggagtctcactctgttgcccaggctggagtgtagtggcacgatctcggctcactgcaagctccgcctcccgggttcacaccattctcctgcctcagcctctggagtagctgagactacaggcgttcgccaccacgcccggctaattttgtgtgtttttttttttttagtagagacggggtttcaccatgttagccaggatggtctcgatctcctgacctcctgattcactcgccttagcctcccaaagtgcggagattacaggcgtgagccaccgcgcccaacctacaaaaagatttttaaaaaattagctgggtgtggtggtgcacgttcatagtcctagctactcaggaggctaaggcgggagatcacttgagtctaggagttagaggttacaatgaactgtcattacaccactgcactgcagcctgggtgacagaacaagaccatctcaaaaaaaaaaaaaggaaatttaaaaagaggtacatttggctacataaaactgagaaaaaatctattttcagataaagagaagtgtgcaaactgaaacctgggaaatacacaggacaaaagtcaatttctttaatgtgtagtgaaatatataaatcaataagacacaaaccacaccaagccatattaaacagtgttgactgccttctagaatgcatttccctcaactcccctcctttctgattttgttgtcaacatcagagtgttcaatctcaggggatggatcatgtgtggtcaaagtctgatatttcaatcccatttcttgcttttctaattcccttgcagctaaggatgaccatatgacatggttctggtcaaggaaatataaagtagaaatctgctcgaaggcatcacagaaggcctttacttccatgataaaaaggactcttcttggatatatacccaaaagaagcagttgtcaccactatttcctttttctttctgcctcgaatatgaatgtgatgtctggagcagctgcagctattttgcgttacaaaggcaccattctaacatacttaaaccactaaaccagctggcagctacctacttccagatgtattcttatgtcagaaaaatgtacccccgatttgttaaagtcatggttagattttctgttatttgtgaccagaagctttctggatacagatcctcatatataaatgggtagctatgtgaatagacaattcacaaatcaagaaatgtgaatagtaaacatatgaaaatagtttaagttcattataatcacagcattagaaattaaatgaagcataattttttttcccacaaaattggcaaagagttttaaaaagtaataccaccatccagggatagaaaggattcgttaaaacaaaggccttcccgcactgccagtgaaggtgcaatttggtagaacacttggaaagcagtttggtaacatgtaatgagaacttagaaaacatctatattatttacatgagtaattctactttttggaatttacccttgagataatttaaactgaattaagaatgtaagcataaaggcttgccagtgttacttaatgtagcaataagaaacaaatagaataagaaaacactaaagtgactaaaatattggaatggttaactaaattatagaatatatgcagtagaatagtatacaaccacaaaagttatgttgaccctgaatcttcagtatgaaggggttatttttatgttatgatgttcataaataacaaaaatacctaagaccacaactgtgttaaaagtaatgtgggcgaaggctgggtgcggtggctcatgcctgtaatcccagcactttgggaggccgaggcaggcagatcacttgaggtcaggagttcaagaacagcctgaccaacatggcaaaaacccatctctactaaaaatacaaaaattagccgggtgtggtggcacatgcctgtagttccagctactcgggtggttgagacaggaatatccaggcagaggttgtagtgagccgagatcacaccactgcactccagcctgggcgacagaatgagactccgtatcaaaataaattaattaattaaataaaataaaatgacatgggggtaacagtttgacaattcctcaaaaagttaaacatagaattaccatatgttccagtaattccattcctacctatatactctggagaactgagaacaggtactcaaacaaatacttgtgagacaattgttcatagcagcattattcacaatagccaaaatatggaaacaactcaaatgtctatcaatggatgaatagataaataaattgtggcatatgcatacaatagattattattcagtcaagaaaaggaataaagtattaatacatgttataaggtggatgaacctcaaaaacattacactaagtaaaagaagacagacaaaaattatataattccatttacatgaaatatccagtataggtaaacccatggttgctagtagttgaggggaggtgggaatgaagagtaactgtttaatgggttctattttgggttgatgaaaatgttttggtactagatagagggggtgattgtacaacattgttaatgtacaaaatgccaatgaattgttagctttaaagtggatagttttatgttatattaatttaacttcaataaaattttatttttcattcttttttgaatttgcttctaatttttatggatatatagtagttgcacatatttatgggatacatgtgatatttaatataagaatacaatgtgtaatgatcaaatatgagtaagtaagatatccattgcctcaagcatttatcatttctttgtgttggaaacattccagatctttacttctagctattttgaagtgtacaataaattataaactcgtttccttattgtgctatcaaacactagatattattccttctatctaactgtatttttgtgccttctagccaagtccttttcatcctcccttccccactacctttcccagcctcttgtaatcatccttctattcaatacctccatatgactaactcttttagctcccatatatgagtgagaatatgtgatatttgtatttctgtactaggcttatttcacttaatataatatcttccagttccatctatattgttgcaaatcataggatttagttccttttctatggctgaataatatcccattatgtacactaatgtatatacactacattttccttattcattcatccattcatgaacatgtaggttgatctgtatcctggctattgtgaatagtgctgcaataaacatggaagtgcagagatctttttgatacactgatttcctgtcttttgaatatgtacctagcaatgggattgctggatcatatggtagttctatttgtagttttttgaggaacctccaaactgttatccatagtggctgtactaatttacattctcatcaccatctgttattttctgtctttttgataatagccattttattttattttattttatttatttattttttgttttttttggtgagacggagatttactcttgttgcccaggctggagtgcaatggcgcgatctcggctcactgcatcctctgcctcccaggttcaagtgattctcctgcctcagcctcccgagtagctggaattacaggcatgtgtcaccacgcccggctaattttgtatttttagtagagacagggtttcgccgtgttgcccaggctgatctcgaactcctgacctcaggtaatctgcccgcctcggcctcccaaagtgctgggattacaggcgtgagccactgcgcctggccagataatagccattttaactggggtgaaatgatatttcattgtagttttgatttgtatttccctgataattagtgatgtttagcattttttcatatgcctattggccacttgcatgtatttttttgagaagtgtctattcagatctttcgtccattttaaaatttgatttttttttgctattgagttgcttgagttccttacatattctggttattaatccctgttggatgaatagcttgcaaatattttctctcattctgtaggttgtctcttcatgatgttgattgtttctttgctgtggagaagctttttagcttgatataatcacatttgtcaatttttgctttggttgcctgtccttttgacgtcttactcaaatatttgcccagaccaatgtcctggagcatttctcctacattttcttctagtagtttcatagtttgaagtcttagatttaagtctttaatccactttgatttgatttttgtatatggtgagagataggggtctactttcattcttctgcatatggatattcagttttcccagcaccatccattgaagagggatcctttccccattgtatattcttggcacatttgttgaaaatgagctggctgtaaatgtggatttatttctgagttttctatcctgttccattggtctatgtgtctgttttcatgccagtaccatgttattttagttactgctgctttgtagtatattttgaagtcaggtgatgtgatgacttcagctttgctcttttttgctcaggattcatttggctattctgggtcttttgtggttccatcttcattttaggttgtttttctatttctgtgaagaatttcattgatattataataggtattgcattgattctatagatcactttgtgtagtatgggtatttaaacaatactaattcttccaatccatgagcatgggcaacctttccatttgtttatgtcctcttcactttctatcatcagcgttttatagttttcattgtagagatctttcagttctttggttaagtttattcctttatttgtagttattgtaaatgagattgttttttagattgttcaatgttggcatatagaaatgatttttgtatggtgattttgtatcctgcaacttgactgaattcttttatcagttctaacagcttttttgcagagtctttaggatttttgttttaaatgtaagatcatattgtctgaaaacaagaacaatgatttctttctttccaatttggatgccctttatttctttctcttgcctaattgctctagctaggacttccagtattctgttgaactaaaagtagtgaaaggggtatccttgtcttgttccagatcttagaggaaaggctttcagttttcccccactcagtatgatgctagctgtgggtctgtcctatattgctttgattgttttgaggtatgctccttctatatgcagtttgttgagagttttttttttttttatcatgaagagatgttgaattttaatgaatgcttttttgacatctattaaaatgatcatatggtttatgcccttgattctaccaatgtgatacatcatgtttattaacttgcatatgttgaaccatctttgcatcccagggatgcatcccgcctgattataatgaatgaccattttaacgtgttgttgaattcagtttgctagtattttgttatttttgcattgatgtttattagttattggcttatagttttctttcctcactgtgtctttgtctggttttggtatgagggtaatgttggccttatacaattagtttggaagtaaaaaaaaaaaaaagtaaatatggggagttctgcttccagataagatagagtaagtgctttcaccctgtctctcctaggaaatatagccatagaacctggtcacaaggcacagaacagatatctgataagtaaattgtagtaggcaaattgtgaaagaatgtaaaataccactgaaactgctgtgaatttacttttttccctctcctccactataccctgatttggactcagagtagtgcaaaacccagaaatgagcattggtgcaaatggagagagttccaggaaaagccccctagttcaggtttgaggagtaggaaaagggttttctggcagcaacagcagtggtagctggggcgcatacacactaaaactctcagggaagggaatcttcccttcgaattagaggagctaggagaaaatatagaggaaatacttcaggacattggtctggggaaatattttatgaataagacctcaaaaacataggcaacaaaagtaaaaataaacaaatgggattatataaaactcaaaagcttcttcacatcaaaagaaacaatcaacagagtgaaaagataacctgcagagtgggagaaaatatttgcaaactactcatccaaaagggaattaatatccagaatacacaataaattgaaacacctcaacagcaaaaaagctgacaatccaatttaaaaatgggcaaatgatctgaatagacacttctcaaaagaagacatacaaatgggtgagaaatacatgaaaaagatgctcaacatcactaatcatcagggaaatgcaaatcaaaactataatgaggcatcatctcagtatggttagaatagctattatcaaaaaggaaaaaaaaaataacaaatgctggtgaggatgtggagaaaagggaactcttatacactgttggtggggaatgcaaactagtatagccactatggagaacagtatggaaggtccttcaagacactacatatagaataccatatgatccagcaattccactgctgggtatacccaaaagaaaggatatcagtatattaaagagatagctatacttctatatttattgcggcactattcacaatagcctagatatagaatcaacctaggtatccaacagatgaatggataaagaaaatgtggcatatatatactgtagaatactattcagccataaaaagaatgagatcttgtcatttgtggcaacatggatgaaactggatgacattatgttaagtgaaataaaccaagaacacaaagctaaacaccacacgttctcactcataagtggaggcttaaaaaagctgacgtcatagaagtaaaaagtagaatagaagatattagaggctgggaatggggaaaggaaggagaaggagagacttgttaaaggatataaaattccagctagagaggaggaataagttttactgtctacagcactgtgggatgactataggtatttaataacattaatatggctgggcatggtggctcatgcctgtcatcccagcactttgggaggctgaggcaggtagatcacttgagctcaggagtttgaaagcccaggcaacatggcgaaaccctgtctttacaaaaaatagaaaaattagccaggcgtggtggtgagtacctgtagtcccagctactagggaggctgaggtggaaggactacttgaggccaggaggtggaggttgcagtgagcccagattgcaccactgcactccagcctgggcaacagagcaagacactatttcagagaaaagaaaaaaatatatatatatgtatgcatatatatagtttcaaatagctagaagagaggatatggaatgcccccaacacaaggaaatgataaatgtttgagattatgaatatgctaattatccagatctaatcaccatgtattatacgtatcaaaagatcaccatatacttcatgaatatgtacaattattatttgctaattaaaattaaaataatgtaaaaaccaaaaaacgcttatactggaaaagaagaaaggtcttcaatcaataatctaagttttcaccttaagaaatgagaaaaaaatagcaaaataaacataaagcaggcaatggtaaatatcagagcagaaatcaattaaattgaaacaaaaacaataaagaaaaatcaaagtaagacaaaaagcaggtcctttgaaaacatcaataaatttgataaacctttaacacgactaaaaaggaaaaacagggaaagaatacaaattatcaataccaggaatgaaagaggggctattcctacataatattcagacattaaaaggataataaataaatattataaataactttatgcatataaacctgacaacttagaatagatccatttctcaaaaaacacgcactgtcaaactcactcatgatgaaatagccgaaaaagttctatatctatcaaagaaattgagctcatagtttaaaacctttcaaaaaagaaacttcccattccagatggtttcattgtttcattttaccaatcgtttaaggaagaagcaatgccagggctatataatctcttccagaaaatagaagaaaacacttcctaagtcattttacaaggctagaattactgacaccaaaaccacacaaaaatagtatacaggctgggcgtggtggctcatggctgtaatcccagcactttgggaggctggggcgggggatcacttgaacccaagagttcaagatcagcctgggcaatatggtgaaaccctgtctccactaaaaatacaaaaaagttagctgggcgtggtggcacacgcctgtagtcccagctacttagggaggctggggtgggaggattactcaggcctggaaggcagaggttgcagtgggctgagatcacgccactgcactccagcctgggtgacagaatgagaccctgtcacaaagaaaaaaaaaaaaggatagaaaaccagaaaactatatatcagtacctctcatgaacccagattttttaaaaaccctcaatattagcaaatgtagtgaaatcatataaaaagaatagtacatgatgatcaagtgggattttcttgagcatgtaagtggattagttttctcaggctaccccaataaagtactgcacattgagcgacttgaacaacagacatgtttcacagttttggaggctggaggtcaaggtgctggcagggccatgctccctctgggggcactaaggaagggtctgttccaggcctctctcctagcttctgaagtagttccttgccttgtggcagcgttactcctgtctgcacaaagcattctccctgcgtgcttgtctgtctttgtgtccaaattttccactttgtataaggacatcattaatattagaatagggcccatcctaatcacctcattttaacttgattttctctgtaaagaccctatttctaagtaaggtcacattctgaggtattggcaattaggactctaacatagcttttttattttttggaggacagttcaacccacaacagtaaggctggtttgatattctaaaatcaattactgttaataagtatatcgccaggcgcagtggctcatgcctgtaatcccagcactttgggaggccaaggtgagcagatcacgaggtcaggagattgagaccatcctagctaacaaggtgaaaccccgtctctactaaaaatacaaaaaattagccgggcgtggtggcgggctcctgtagtcccaagtattcgggaggctgaggcaggagaatggcgtgaacccgagtgcagtgagctgagatcgcacgactgcactccagcctgggcgatagagtgagattctgtctcaaaaaaaaaaataaaaaaaaaaataaataagtatatcaatagtctatagaagaaaaagccacatggtcatagaagttgatgcagaaaaagcatttaataaaattcaagatatgttcaaataaaagctctcagcaagcaagaaatagaaccagataaaagtcatctacaggccgggcatggtggcttatgcctgtaatcccaacagtttgggaggccgaggcgggtggatcacttgagcccgggaggtggagaccagtctggccaacatagcaaaaccccatctctattaaaaaaaattaacaaaaaaataaaaataaaaaagtcatctacaaaaaaatcatagctaacatcgtagttcatagtgaaagacagtgctcagcaacaaagcaaggaagtacaatgtcaatactcctattcaacatcatgcttgaagtcctagtcaatattaggcaagaaaaagaaataaaaggcatacatattggaaaggaaaaaataaaaccatcaccacttacaggagacatgattggccatgtagaaaatcacccagaaaaatctgcccccctcaaaaaagaacatcctagagccaataagtaagtttagctaagtggtagggtacaagatcaatatcaaaaatcaattgtatttctctatactagcaatgaacaattttaaacttaaatgtaaaaatttatatggaaaagcaaaggaatgatatagacaaaatagttttaaaaacaaagaataaaatcggatggcttatttaactcagtaaaacacctttgagagtcacacaggttgttgtatgtataaataattcattctggctgggcacagtggctcacacttataatcccagcactttgggaggccaagatgggcagatcacctgaggtcaggagtttgacaccagcttggccaacagggcgaaaacttgtctctactaaaaataaaaaaaaattagctaggtgtggcgtcacacagctgtaatcccaactactcaggaggttgaggcttgagaatagtttgaacccaggaggtggaggttgcattgagccaagattgtgccaccgcactccagcttaggcgacaaagagagaccctgtctcaaaaaaaaaaaaagggaggaagcatactacttgacgttaagacctactataaagccacagtaatcaggataccatagtatttgtgaaggaaaagacatagaggtctatggaaaagagcagagtccaaaaatggactccaaaaatatagcaaattttttacaaaggggcaaaagcaatttaatgaaggacagtctttcaacaatggtgttgggataattgggcattaatatgcaaaaataaaatgaacctcaatctaaacctcacactgcacataaatcttatttcaaaatgcatcagtgtaagacataaaactataaaactttaaaaagaaatcataggagaaaatgtttgtaatctgggctgaggcagagtattcttagaacgctactaaaagcatgattcataaaagaaaaaagtttgatatgttggatttcatcaaactgggtaacttttactccacaaagacacagtaggaaagttaagacaagctacagatgggaagaaaatgtttgcaaacctggtgttcaacaggagacttgtatctggaatatataaagaattctcaaaattcatcaatcagaaaacaaataacccaactaaaaactgttcaaaagattttagcagatacttccccaaagagaatatatggaaggcaagtaagcacataaaaagatgtttaccatcattagtcactagggaaatgcaaattgaaacatgaggagatacctctacaaacctattagaatggttaaaataaaaaaatattcaaaataccaaatgctggcaagactaaagaactactatgctcttgtctgaaagtatgtgtccccccagaattcatatgttgagccctacccctcaaggtgatggtagtaagggatggggcctttggcaggtgattaggtggagagggcttctccctcatgaatggatcagtgcccttttacatgaggcctgagaggaagcctttttgccccttctaccatgtgaggacacagaaaaggcaccctctatgaggagggggacttcaccaaacacagactctaccagtgccttgatcttggacttcccagggtctagaactataagcaatagatttctgctctttataaattacccagtctaaggtattttgttgtagtagcctgaatgacaaagacagagattggaactcttatatactgttggtaggaatgcagaatggtacagctgtgggaaaaacagtttggcagtttcttgcaaattcaagaatatgatccagcaattccactactaataaaaatcatgttcacacaaaagcctgctcatggatgttgatagcagcattatttaatatcatcaaaatgtgtaaacaaaacaagtgttcttcagtgggtgaaaggataaacgaactgtagtaatccatataatgaaatactaaatactactcagcaatataaaggaatgaattatttatttatttgttcatttatttattttgagatgaagtcttgctctgtagcccatactggagtgcagtggcaccatctcagtttactgcaacctccacctcccaggttgaagtgattctcctgcttcagcttcctgagtagctgggaccacagacgcgtgccaccacgcctggctaatttttgtatttttagtagagacagagttttgccatgttggccaggctgctctcaacctggccaacatggcgaaacctcaagtgattctcctacctcggcctcccgaagtgttgggattacaggtgtgagccaccttgcctggccagaatgaattatttatacatacgacaacctgtgtgaccctcattttactgagttaaagaagccattctcaaaaggttatgtattctgtgcttccatttatataacattctttaacaaataaaacggtagtgttgaagaacaaaatagtggttgccaggataagttactccctccctgatcccctttcctccctcccccatcccctttcctccctcccccatcccctttcctccctcccccatcccctttcctccctccccatcctctttcctccctcccccatcccctttcctccctcccccatcccctttcctccctcccccaccccctttcctccctcccccatcccctttcctccctccccatcctctttcctccctcccccatcccctttcctccctcccccatcccctttcctcccttaactgctgttaaatgcatcgtttcaaagtgaaaaccaaggtaagctttatcaatataaaaaaacacaactttttgttggggtgcagagaatttggtcactgtcatctcccatttcctctttcatctagaaagcctaacacaccatggaatgaggaagctggctcctgtgatctgttaatatttgaagtatggccttttaatagggccattggcaatgtcaataaggaaacatcctgagaaggagagggcgatgagcctatagctctcaaatctcacagcttggggaataactcactacagaaaaaccgacctgaatgaaggtgaaggagagaatccacccacgtttacgaaagaccatgccttagctagcacttcttagttcttagccaccttcttctcaattttaagaccctgctgtgctaaacaggaaggaaagcattttcttttcttttcttttattattacgatactttaagttttagggtacatgtgcacaatgtgcaggttagttacatatgcatacatgtgccatgctggtgtgctgcacccattaactcgtcatttagcattaggtatatctccttactaaacttaacctgacctccttttgaccttcatgtggttctcaggtttaagaccatctgtgctaatgaggaatgaaagtattttctgactaaccttcacctgactttctttcgcccttcacctggtttcctcagatctttctttcccttagtttgtattgcctatagcagtaagttaagttccatttgactaggtattgagtaccgaagtgtgtgaggctctccatccctgaaataatccttgaccacaaggaatcaaggttgatgtacaacttaccatgtaccaacttacctgtgcacacattaacattgtaaagaaaaggacaagggcagaaaaacatttagacatttttaaaaagaaatttacccttacaagttatttattttttaaaagacatttttaaaaagtattttaccttcgtaacggacatttatgaaagtaaaaaatagtcaaacattccatatttattatccaaagaaacagttttatttatttatttatgtatttatttcaagacagagttttgctcttgttacccaagctggagtacaatggcgcggtctcggctcactgcaacctccacctcctgggttcaagcgattcttctgtctcagcttcccaggtagctgggcttataggtgccagccaccaagcctggctaatttttgtatttttagtagagatggggtttcaccgtgttggccaggctggtctcaaactcctgacctcaggcaatccacccatctcagcctcccaaagtgctgggattacaggcgtgagccacagcacctggccctatttttaataacatatgataactaaaaaataaaacagtagtaaaagggttaaagtccctttaaatgtgattccccaaagataatcattttaacagtataaagtcttccttatagaatgcatatatgcatttttaacataaatggttgccagcaattttttctatataggcagatggtatcagttatcttcccatacccattatgccattttccttagtaataacatctccaacttttagctgagcatttgactacatagaattgtgtgttttttatttttatggtgaatggagataaaatagcaagagatttaaagtggatagatcccagtcctggttctgttatgagctagatgggccaggtgaggaaagtcacttcaactttttggtactgtaggaggcagcacagcacagtgattatgtacagatggagttcccaaatcggacactccctagcagtattatctcaagcatgtcacttaccctttctaagcttcctttgtcgaatggagataaagatatcccttaactcatcaggttgttgtaagaattaaatgagatagtgcacacaaagagcttagcatgggtcaatactcaacaaatgttagctattattacagttgttttattagcttttggaaaagaagataatagtatttgctttatcaggttgaggatgaggataaaaaaatatgaaagactttataagctaaaagagttataatatcactaagcttaaaaagaacactgctgcttggcattgggatatggaacgatattattatagtagttctgtgtgtattgcctgtggggacaaatccacaggagtaactagacaggaaaatgtatctgagaggaagttctccctcagtttaaaggaattaactaaattggatgccattggaaagtgcagacagctcagagatccgtggtgtgttaatctggtactttgttatgtttcagaacttgctcaagcctcctgagcacacttgtgacttccaggcattgttcttgttgtcccttttccaggccacacaggactgcataagggcgagctacagttcatcttacacattctatcgccaatgaaaacctttcatagactgaagccatttgggacagaatctgtgttttattttccactgtattctcagggccaatccagtgtctggcacacagtaaaaagcccaatcagtagacatccaatgtctctagaaactctgccccttagccagaggcagatttcacaggctgggagaggagagggcaggcagaatgtgtaggggaggcaggaggcttgtgtatctggcttttaacctctgccggatgtggcagctgccaccagctatagaccactttatgactttgacatatacagtcctgttcagacctgtgccacagctcaaggatattagtgtaaatcaatcagaaaaaactaaattctggaaaaccctcctgggctgcaatcttgccatggagcaaaaaatggtctaaatctagacatgccatttaaaaacttgattactccaggcaccgtaacatctggttctgatgccagatagatttaggttcaaattctatctctgacgtttatgagctgtgtgaccttaggcaagttccttaacgttgctaaatttcagttttccttctataaaaagccattaataataccccaagaaatggttgtgaggattattcaatcttgatgggtaaagtagttttgaaatagatctggattataaattctggctctgctgcttaagttggacaaaatactcgaccttttttaattgtttccttctctgtgaaatgagaattaaagtgtatacctaatgaggttattgggaggattaattaaatctgtataacatgtttagtacagtgcctagtatatagtaagggcctaataaatgttagctgtcgttattaccacaataattactattattacataaaaaggcagcacttaatatatgttggtgtggccatctcctccaccttaatctcctactaatgagaaatatccaagaattggacaattgggtcaagcgtaaggcgtatcttgatagatattgccataatgctcaccaaaaagcttgtaatcaacttacaacgtcactaacaatgtgcaaaatctgtccatttcattccaaccctcaccaacatttttttttctgtcatttttaaaggggcagcatggtatctcaaggttacttcaattttcatttattactgtgagggtagacattttcccatctgttatgtttactgtttggatatcttctggtgtgaatgatttatttctatcttttgcctatttatcagtttgaatcttggtgtttttcttaaaaatctgaataaactatatattagaaacattaactattatatttaatgcaaatactttcctggtaagttggagccagagaggtctggtacagatgaggggagatcaggagaaagttctatgtgttcaggaacttttctgtgggtggggctgctgccttctgcatgatgaactcaactaccctcacacctatctcagaacatctctggccctgcatgacactgtagttcttttttaaaaaaaaatgattttatttattttatttttaaagacagggtctctactgtgtcactctggttggagtggaacaatcatagttcactgcagccttgaactcttgagctcaagggatcctcccacctgagcctcctgagtagctagtactgcaagtatgtgccacaatatcaggctaaatttatttttaatttttattgtagagacatggtctctctgtgttggtcaggctggtctcaaactcttggcctcaagcgatccttttgcctcagtctcccaaagcactgggattacaggcgtgagccaccgggcccagccccaactatagggtgcctgtatttcttcttagttgtcttgcagatacctcaagcctatcatagatataaatgaactcatcagccattccccaacctgctaaatttctaaacttccccatttggacccttattgttctagtcaagaggtcttgaagctctttctcaatacagtaaaaaggcttccctgagtctctcagacaggcctgttgaagcatctcttttttgttgttgttcacatatgccaagccagaacagaatgaaattatactcttgagttataagtcatgtgtcctgatttttgatttggaaaatatgatcacacatatcaagaaaatgagcagaagaggcagccaagttgccatgttgtctcaggccctttctgcatgccaatatctgatactgaaattaatacatgtgagcctgaagtgggtaagcagaacaatcccatggagcctgcaagccagacatgggtatttgatagtggaagtggggaattaatcaaaggaaaagacagtactagaaatcattgccttgggtatttggtccacacatctactttccttaaatgatttttgtattttaatggtgatatttttcaaattgtttgggcaattaaatacttttaataattagtataatacagtatcgattttgtcttagcattatggctttttctgttgatgcttccattagaatatgagtgccatgaaattagaaaatgtgttttgaccttccttctaatgcccagcccaatggctttgtgtagatacacgtgctttgtgtagatctatgtggagatccagttccctctaaagtcaactgcagtgggcatcgtgagttgcaatagagaaaacacaataaggcaagcaagcatcaggtcaaaaataaaaagtcaagataacatcttaaatgaaagcttctctccttgttattttctaactctcccctcaatttccccaaatatacaatggatcacttaagaagccccatcctcttcagagacaagaaacatttccaataacacacactgagaataaccgcagtttcttagtgcctttggaatatgcactgaaattccgtgcagttctgaaattcttcttctgaaagttgggtgtgccttgtgcggtgcatgtgcatatgtgtaggtacattatgcacgtgggtgtgtgtgggtgtggcatactgttctcctgaaggcacactttctacactgttcaggggaggggaatgataaagccactttttctcaaggcagatggtatgaaatccatattccccaacctcaaatattccttcatccctcaaagagtcatgtttaggggagaagggtgaagtcagggcattgggcttagtgtattctaattctttctacaaagaccaactagattttccaatttgaagagggtccctggagggtttcttttgtcggcggtgggggacaggcaattctagaaagaattgggaacctggaactcgcattagcaagcagttgatcataaaacaaaatgacttgctaaattccaatcaatggcacacagtgtggtctgagagtgatgtcctgaattcccttccacagttatctagagaaggacttagatggatatattccaatattggcgagagagtccctttaattcattccagcacttatcccacacttccccagcagaaaaactggttaatgtacatcctgggtaattatctgtgtctctggatttcattctttagtaactaatccctcacctacaacagtgtatagtaaggtcaaggatgaaatttctcagaaactcgctccccacagcaccacgcacaagaagacccacccattccagccaaccccgtgtgtccaagtcccattcgcccacataagcctctatttgacaaattcctcgagctcctacccttggggtggggacctttcgcctcccgtgaggtgccggctctcccgtgcttcgctgactgcccgcattgggtggggagattcgcctctggtgccgagggaaaactgcgttaggcgagggtggaagctctgtcggacccgtgcgagcacgtgggtgcgcgcgggccgcggagtgagcagcagccaggattcctctccagatcgcgcccccgccgcatttcattgcctgaaacggcccacgccccgcgatggcccagcagacacccggcacagcacagcgtcactgcgcggcccccgcagcgcacggacccccccaccctgcccgaccccagacccgcagccgagcccgtctggtatgtggtgggtggagagggtaccaactaagcatcccaaagtccttcagggagcaactccgcgcagttttctcttcccgacccgcagcctccgcagcagccgctcggagcacccccgggcaggtgccccgcgcgagctcagcgccttccccgcggatccccggcccctgcgggacccaggcccaggacaaaagaaatgaatttgctctgtacctgatcctgtccttctcggccctctgtaactcctcattcctttccagcacctgaaggatcttcctggcctcttcgtcatttaagaaactgaaatcaaacgccggaggaactttcgtcattttctttactgtgtgtgagttacacttaagctccttggcgcctcctgttaggaaggcatttttcaacctgtacaagaccagtttcacgaacttgatcccacagccaataataagtccgcccctttgaaagtctaaaaccacaaacctagggaacgcccacacctgaagggctcatattgacaataccttaatgacatgtttctctcaacctgtccaaccgagatgcaaagtgaacggctaaagggagagagggaaccaatcccgttccaagggggcgggccctcccttgtcccctccctcgtcccctccctcgtctcgtcccgtccctcgtcccctccctcgtcccctccggtcaccctccccgccccctatctgagttgttaagcaaacaagcctacataattctgcctcttaagtgaggcaaggctaagtgttggcgccaaagtatttgcttttgctgttgctgtttgctcgcagaacttgagcttgattagtaaaggagtgaaaaaggagattcatgactaatcctccctttcaataattaagagcccatagaaaatagaattgcaagtagggtttgtaactggcaaaagggttacttatctgaaagaccaggaagaactaaactcaattacactactgactgtggatgaacctggctgaagggcggaaattagtgtatccttggaaacgaattatttgccaagcctctcatcccacagacacccccacctccactgtcccacaaaagtcattcttagactttagaaacaaacaaacaaacaaacaaaaccgtttatggtattttaggagaagacagcccagaagcaaaggactgtagaaaacacctgttagaagttttctgtaagattttattatcatcttaataaactcagagaagtaatacacatgccatttaaaaatacctaatcctctggtgaaagcaaatggtaatcctatgaagccacagaaatagctttcctagaaagtcaattgttccacaatgcaatgaagaataatagaaacttataaagatattcacatatatactttttttttaattatcaaggcttttacagaaaacatgtttttatcttggcttcacttcctacccaaaaataactctgtcagattgactttcctgccccatagccttaatttggtcattttgaagatggtggtgatgattactaacatataaaatgtacttctacatatatcatttcttttcatggcacataaacccaattaaaattttgtatctgtacaagaacatgatatcaaaaattgccacttgtgttttgttctctgggctaccccatttgatcatcattatttaaaacatgcctaggcagctagccattcagataactttctgtgggtgtctgttatttgtgtgaaccaggaaccaattttgttcacccatggtgtacacaatacagaactcctttataaatagtgtctgtattaatgatcctgttttgggagtatgtcttgtatatggtgtccagtttttctagtgtgttcatttattcagcatacacatgggacttttcaatatggtcactggtgggattttacactgtttccagtatatcagtgaactgattt

SEQ ID NO: 191 - DNA, 315456 bp, Homo sapiens
  source 1..315456: mol_type = genomic DNA
tagggagctgttctgagtcatgaggctgaggagaaaatcctctctttaattgaatttcactgtctacgcacctctcaaaacaccatctggatatgtgggctctactccttgttctgcagctaggtagcctgttgagtcacttctctggacttccacaaacactttcactcctgtttacagcaccatccccgtgctatcattacaagctcctcttcctctcccagatgtctacaaagaaaggatgaggtaaagtccaatggacttacggtttccactgacctaagatggccacttgaaattatcagaacaaaattctctgatgaacttttcttctaaaacaaaactgaaaataaatggaaaagaaatatgaaatgtatgagagtttgagggagggactctaaagtgcttattgtttattcagcataatacatggtcaaactcaataatgtctttctcttccctgttttctctggcctcttccaagtagaagaaagcatttaatatcagaagtctccatttttcataacagagttagggatatgttttttttttcagtttatacttggagtttaacaataatcataagcccaagatagcattttcagggatagaaatgttctttttaacaagaagcacaactaaacttttccacagatttaaaaattaaaagtaaatgaaactatattcacatttgttgttgattattttgtttgccagattcttgctcaaaacaatgtttgaccaaaaatggcattagggtcccaatggcgagacatctcctcagttactttgcagcaatcctcttgttcattggtgtgaatttctaccttattacccctttttctttctcaaaagagaaactctgaaacttgagattctcacaaacattaaagagttcatcttgtaaataatctgttctccccaatatactcattattccttggcttctaaaccaaagcctcttcccagtgctacgcagacttaggtcaatggttgaatctataaccgtgcccccaacccctgcaagtattgggttactgttgtgggtctgtatttccatctcactaacatgctggtgggttatctggatagttctttgtgcaaactgaacatttcttaattatactagtgttttcttggtactaattccccccacccccccaatgaaaaacgattatcatatatatctatctcaaacatagagatttcagttagaactgcctacctggaagtcgtaatactttctttcatgcagcgacattttagagataaaagttcaagtggatttgaagattcgaagtggaaaacaatttgcactggcaaagttgaataatgaagttacaacttatgctcagttatttcttgataatgggtagagtgacttattgtgttttccacgaagtttgagcttttgaaactgcagggcaccctacatggccatgacaatgatgtctgtgggaaaaggaatagcagctttgaaatattcacaaccaacacaattttgattaaacaaagaactctggtttttaatagttttgatcattaaaaaagtttaaacctgcatagcaatcatttcaaaaataattatttaatgttccataattaaactgtacacaacctagtcttgggacacagaagccagtgaggtgagtttggagcagtctggtgcagtcccaggagccaggagttgagttctcattggcctttttttttttgtcattctgctcatctaagtttttggatagttggcacaatctggctctgctgatgagtggatctgcactgggaagagagagcagcttgacccccatcccttcttgcttcccctcccccactcagccggattcctcaaagtcgctcaatgtctcggtatttcttcctcaaaatagagacctggtctttaaagaggacggggtcgagcctcatctgagagtggatcagcggcatgtagccaaaccagctggcaaacgtattcatgcagctctgtcgctgggcaaagtggtcagggtcagcccaacgggaagcccgagaagtctagggagaaggagagaaacaaggataatgatgagagaagtgcaaggtgagatggaaacattgcagaaaatggagtcaggcaaatgagcaagcagcaaagcttggggtctggcccggccaccaagtctcaccatctatgcacctgctgaaaatgcaatcgctgatattggtttttcccaaggtatgctacgttcctcagtgttaaaaacacaaaaacaaagattcatgttgactttaattctctaaaatttattgactaattctctggtcagtccacgacttagcaactgaaactcgactactacagtgactcaatctaaaacctctctttgcacttgggaccaagtactaagattaaagatgtgtttctgctttcaaagagttttctaaatccttcctgtttatgtagttgatttagaaatacccaccaacttttagaagtctatctttctctctatccatcacttccttccttctactatctctttacctttataagggtcctactaaatcctttgttaaaaattcacatatatagttgaagaagaacaaaatagtgccttttacatgtcactcaaggctagtgttacgcagcatctaaaactccgttttctcttctgtagcctccccattgacgtgactccatgaggatgagaaggtgagattcagtggtatatagagcatgttgctgtatgactaactttatactaaaatctcaaaattctgttcttctcttaacccaagaattgttggctttcctgcttgactaaaacccccaaaggttactttttaaagggcaatcagccctccaaagaatcactgctcacccagaataaagattaactctcgacaaatagaaaagatggctaccatgtttttagctctctgtgttgcccctaaagttggttaaatatttttagatcatgcaaatgattggcattgatttaaaaagaatgccttaatgactggagtgctgaaatttaaatagaatgactaagcacattgtctttcaatccctgtttttatgaaacatggaaaagatgggctgcccaattatgggggaacccccacaagcccatttatgtcaataggcaagtctttaatgatgtatatgtatgcacgtgtgttctgtgtatttgttgtactcacagttttagaaaaatactttcatgggaagatacattttagtgtgagaagcagtaagagtcacttcagaatcatagtgtcaacatgctcgaaaataacattgaagataaacacaaatgtcaagttacctctgaacagcagaataacaaacaaaacactatttgtaaagtgttttcatggagttcatttgaatctcaccacaatctggtgaagtatctacccaggtaataacatccccattttatagctgaggaagcaagtttaagaaagttagagttatttgttcaaggctagagaggggcagaactcaagcttcattcttcagcctttatatgaggggaactctacttgataaatcagagaaagatatcaaatggagctgactggttgagttcatatcagagtagacaatcccaaatgtaacttgttttgaccctaaatggatatgagtttgtgggccatttttttttcttttttttaaaggcagagtctcactctgtcacgcaggctggagtgcggtggcatgatcttggctcactgcaacctccaccacatgggttcaagtgattcttgtgtctcagcctcccaagtatctgggattacaggtgcacaccaccatgcatggctaatttttgtatttttagtagagatggggttttgccattttgcccaggctggtcctgaactcctgagctcaagcaatccacctgctctggcctcccaaaatgctgggattataggcatgagccactgtgcccggcctgtgggccatttttgattggcccactcattcccaaagggtgctgtacccaggcaaaatactcatatatgcaactagaaatactgtctagagtttacactcattcctattcaaaaaattttttttaaagttcagttgaatcattcaggtatcgttttgcttctagatgttaacatttattctgagtcaaccaacatctattagaaaagatgcctttcttatgtaataaaagcctaatcctagaggatgatatctatttactttaccggtcatacaaacattcaataaattaatgtgtatgatggaaagaagggggcaaatatagtacctgaatacacctagttagacctaaggttaaatttagatttttttgttaaagatgtatgaattactagaaatactgtttggtagaattaggctaatctatgaaaatagcacaaatccaccccctaagaggccttgtatgactagaattccccacttagtgagtgttctgaagaactctgagtaaaaaaatatttttaaaatgtcatgtccttaaatgagataatatacagtcatgcaccacataatgacatttcaatcaatgttggatcacatagatgactattgtcccatatactgtaataccatatttttattgtaccttttctgtatttagaaatgtttagatacacaaatatttatcactgtgttacaactgcctacagtattcagtacagtgacatgctatatatgttatagcctaggagcaataggctatagtaggctgtaccatatagggctgtgtaagtacacttgataatgtttggataatgacaagatcaccaaatgatgcatttctcagaatgtatcctcattcttaagagataaataaaaaatataaataaaaatgtttgggcacataatagacaatacatcttgcttgaattcgaatattctctcagccttaaaaatttttacaaatcctcttatctgttctttctgtaattagaaggaaacagaattttctgccagactctttgctaaggacagctctttcatcataaccaatacctagaacagtgcctggtaacatgctcactaagtactaaataactttttataaactttaaattctttataaactttaaatttttgcttactaaatttagtgaatgaaaaactatcagcttaacatgaggcctagctaagatttcctttgcaaaagctagatttgtatatgttttccaatgcctgtgagaacaaggcacatgcaaagcccctcaaaattgaactaatataaccatgttaaagtatgttcattcagattaacctcaatcctgttggatgctccatgatttaacgtgagtgaatcttaatgctctttcttaaggttttttgtttcttttttctttttctttttttttgagacagagccttgttctgtcacccagcctgaagtgcagtggcatgatctcaacccactgcaacctctgccttccagtttcaagcaattctcgtgcctcagccacccgagtaagctgggattacaagcgtgcaccactatgaccagctaattttttgtatttttagtagagatggggtttcgacatgttggcaaggctggtctcaaactcctggcctcaagtgatctgcctgcctcggcctcccaaaatgctgggattatcagtatgagccactgtgcctggctaagatttttgatttcttacatatagtaggggctctgctcaagatgaataaagatagatgaaattcggcatatccaggtggacctgataccaagatggtggggtgtacaaggacaagcagtgaagtccacagaccctgggattcaattcccaattctgtctctaacttactgggcaacttgtggcaatatgcttaaattcactaggtcctagttttcttacttataaaaagaaaatgttggattctatttccttgaaaatacctttaatactaaaattgtataactcaacacaatattttacttcacttttataaaagctttcaaacatattatttcaaccctgtaaggtagatttcaccatttccatgttaaagatgagccaactgagtttcagaaggttactgacttgcctgtattttaaatcctgattctagaactgaaaattaaatattgtgattcctgttatgtcaccaagacacaattcaactcaactgcaagcaccagaaaactgtgttaaagagagtatggtttgctagacattaaataaggtacctacaatcaactttcataagttatttgtagggctttaattctgctgagggctgaatgtttgtgccccctaatatttatatgttgaagcttaattcttaatgtgatgatatttgcaggtgaggtctctgtgggatgattaggtcatgagggtggagtcctcacaaatgggagcagtgctcttataaaaaggaccctagagaactctcttgcccttctttctgccatgtgaagacacaatgagcagagggctatctatgaatcaggaaacagtctcttgtcaggcaccaaatctgctggtgccttgatctgggactctccagcctctagaactatgaaaaataaatgtctgttatttaagtcacccagtcaatggtatttttgtcatagcagcccaaatggactaagacaaactctaaagacatatctttctcatgtcaccttaaagattataggagagctttacatccttggcataaagatactcttaacttgtgtcttcctaattatccctgcaccaatcatacactcttttctagctttcagatgtagttcattcctggtttctcctcattatatgctcctgggtggaacagctagaggaacgtgagtcctcattacctggggctgaaccaccagtgagtgaagcaagggaagagggctcttctatacttacctgtcccatcattgtctccttatactgcttcttctgggtcactttgattggaggcaattttgtcacagcagacaccaggaagttcatgagaatgtcctcacaattggccaattggtccaccatgttcttcaggctggctggcaggtaatgggagtataggtagtgataatatctgtaaaaatcaaagatgggtttcacagggggccattatcacatgatgacaagtggacttctgagacagaaaacacatacccattctttgaatccctaaacatgtcatgaatggtaatgataatgatgatgatgatgacgataactatcacttctatggtacttgttatataccagatattgttctaaagtgttttacaagaaatgcttcatttagtcttcataaggagcctacaaggcaggttctattattactcccattttacagatgaggaaacaaggcacagagatacagacatacagacattgcttgtccagtctaactctaacatcagacaggtgagttagaaagaagaactaaataattagatggcaagataagttatttacacatgatctatatattataaagctgcttaacaattttaatcattggcttaatcagaactgtatttaatattatcccttgactctgagtccaacaatagactgttctatatttgtgccctataaaccatatatatttcaatcctgttagagcaaaatctgaattaatggggtggtcaatcgtaacagaaaacccataattaatttgaattatttctcatcctactgtttttaaaatgtatttatatacatatagcatatatttataggaaaaatcatttgagtgaatcaaattcttagagtggtggtggcagaagcaataggaacaatgaactttcaagaagtgaaatcttgagaccaagaatcagtcagcctaaatgtttatgccttgagcatttccaagctatccctgagatagcaaaattccctattctttactaaaaagactaaggcaagattggtgtgttcactaatgatagaagagcaggtattttgttactggttgagtggggaatgttagctatctaccctcactagtttggcaatcttactccagtcccctggctttaaagaccaaatatatgcaaacaactgccaaatttgtatctccacccctgagctttttccatatatccttttggatgtcttaacatgtccaagactgaacctatatattttccctcatacttgttccatctgtagttttcctcatctctgttgatcagccctctaatcttccagtgtttcaggtcaaaagacttggagtcatcaaactctacatccagactctctaggcatcatgctaaagcatcttcaaaataatctgatcactacttaccatggccaccattcacttcctggtcccaggatcccaccatctcttgcctagataatgtcaatcacttcctaatagggcttctgcttcaactctgggtctgttatagcctcttctcaacatagaatccacagtggatgcataaaagaaaagccggatttctcctccctgttcaaaccctgtcctcctcccctgtcacttagagaaaaagtcaagtcttcatgatggacatcaaggtcctgcaggatttatcactgtgttaaaactgcctacagtattcggtacagtgacatgctgtacatgtcacaccctgttcaaaccctgccctcctcccatatcacttagagaaaaagtcaagtcctcatgatggacatcaaggtcgtgcatccatgccccctgacttttctgacttcctgtcacccattccacccagtcacagtggtctcctcgatggttctccagtattctgcctcagggcatttattctcgctgttctcctgccacaacactcttggtgcacatgtcctcttgacttcctgtccttcaagtctctgctcaaatctcacctgtgcaatcagaatcaccctggacacccccaatctgccccatctccaccttcagcacccttgatccttttctacactttgtctgttatatcacttatctccttaataaactatggaattattatgtagacagtctttctttgttagaatataagacctgcattggcaaggaattttttctgctttactcagtgatgaatcccaagcacctagaacagtgcccttgggtgctgacttaggtatttacttttgttgttgttattctaaatattcagttacctaatatgccctgagagtattttcacacttcagaccaactgaaaatgttactctaccataatttctggaaatgaaacatgccaagaggtttcactggtttcaaaaacacacatttgacacatcagcaaaacttaagcggggatacagactaattttcctcaatgctgttaacaagatttggccttagttcctatttatgcagcagccaatataaaaagctatgtaaagtctgtaagagacatgtccagattcctcacttgtggtaaatagcagctcctgtcaacaccatggagtagtcgttcgtccactttgatgtgtatccccaccgctccttagagttatcccagaagtggctgcgcgcggggtaccccacaatcctctcagggaagctctgccacactgtgaaggcgaaatccacctgcaggcagaacacaagccaaacaagcaatcaacagtgttaacaaatgtcaacaaaacattaccttctccccactaattcataatgcaaaatccggggactgtggcgaaacattaattctatgtattcatcagcaaattaaactgactgcttgacattttgccccataattatgcacattttaatgttttctgttaaagaaacttcagagtagtatggaaatgaaaggaagaaaaaaatttgctgatatgccctttaaaaatccagtctgttcaagctaaaacataagttgaaaaagcttcttttcccccttcctcaaaggtgcacgtgccttgattcacgtgagacacaaacacatctgttttataaatgagaaatttcccatgtatatccaaagaatgaatatacaacatatatcatacccagcatatatcaaagccaaagtgcctaaaataaaagcaccctcttaagagtaagagaaataactttaaaaaaaaaacaccacaagttctaacaggaatacagagcaggtatcataaagaaaacataattcaggcttcttaggtttgaagatgcacagtttaagagacactagaagaaagcatcaacagtgaaaatcactaagaataagtggggacaagaacaactgaagccacagaattattttaaaggaaatgcagctaaatgtctctccggtgcttatagtagcccaaagcaggtgcttctgaacctgctataaaccagcacttatagttagcaagtgatctgttttcaaatgcataaactcacttctgatttctatgatcatttgatgaatggtaaatcaaaataataaacagaaaataaaaataacaaaaatagtgacagcaaacaatcatataatgctcataattgtgaaatgttataatacaacaggtgcagctataggtgcttatccattttaactcattccatcctcacaatacccctgtaaggcaggggcttttacattcttcagtttacagaaagggaaactaagatataagttcaagtaatttgctgagctaataagtggcagagccaagattcaaactcaggcagtctggtttcaaatgtgctacgtactttatcaaaacttctcttttggctctgttactccagtgttaaaagcaatttgtctcttatacacgctatgattcacctcgttatctttgccgtatctcttctggataagcaatacaaatggaaatttcatctgtttcgcaaatattttgagtcctggcactgtgatggtagctgggggacggagggatgctgctaggtccaggtcctgccctctcagaggttccaaagcaggacctgtgatggttaattgtatgtgtcaatgtgagtataccatgaagtgcccagattaaagatgatttctgggtgtgtctgtgagggtgtttctggatgagactaacattggaatccacgggttcagtaaagcagactgccctcgccagtgcagatgggcaatatccagtcagttcagggcctgaatacaaaacaaaggtgaaggaaggaggaattcctcccctttttctttttgcctgccggctgagctgggacatcgaacttctattgcccttggactgggatttacatcattggctccctggttctcaggctgtaggactctgtctagaattacaccagtagccttcctgggtctgtagcctgcagacggcagatcatgggatttctcagcccccaggattatgtgagccaattactcataataaatctctctctcagtgtatgtatgtatgtatgtatgtatgtgcatgtgtgtaggtatatatatgtgtgtgtgtgtataaatatatatatatatatatatatatattatgttctattgattctgtttgcctgaaaaatcctaatacactgccctatcttaagataaggaagacttaaaaatatggcttgttccccaaaactataacatccacacggggccaggcacagtgtctcacgcctataatcccagcactttgggaggctgaggtgggcggatcacttgaggtcaggagtttgagaccagcttggccaacacggtgaaaccctgtctctactaaaaatatagaaattggctgggcgtggtgttgcacgcctgtaattccagctactggggaggctgaggcacgagaattgcttgaacccaggaggcggaggttgcggtgagccgagatggtgccactgccccctatcgtgggcggcagagtgagactccgtcaaaaaaaaaaaaaaaatccagagcggggaaaaaacccgggtggtggaaccgacattaagaaagcttggtagggagcacgttatctcaaagttaaaaggtagcaggggatggtgagcatctgctagaaaattgaaattaggttgtgattacctacaccttttcactagtggtcaatactaatggagacaactgatgggacagtatattatgcagcctgttgtcaaaggatcagcctggccgtcagcactctttggggttttctatcattctttgaaaaggaaacacatgcactagcaactactacagaacccaatggggtgttctcatcgcatgaatttcttactatcttaaggctgtttcaagtcatttcaaaggaactcaaaagtaaattcagataaaactatgattcttgtgatagctctaatttcatgcagattattaacacatcaaagaaggcaaaggtcagtttaaggccctttctctcaaaaaccaacatctgttttcttttgagcagcgtctgcagcaatccagataaatgtaaataactataaaccaactataatgccctttataggatgctgtttaaaaatccatccttaatgctgcagagagacatttaaacaatctgagatccttagagaggaaaagaaaagtgaaccaacatctattcacctaaaaaaagagaaaagagaaatccttgcccaggaccattttaggcaacacaaccactccactgatcagcaggcaaaagcaaaccagactgccagcctcttagatttacatatcattttcaacccacgttgacttctaattacttcacatacaacacatgttcctcccagcatgcattgagtggttggaattgctattctttgaaaagaaattcaccagcatgaggatgcatcacagcagttgaaagttatttcaccataggatagggaaaaacaatcctagagtgagactaattgccttgtgcccagggaaagatagaggatgaatcaatacttcaggtcataggatgatgattaaggtacatgctgtagttgtcttgaccatttgttgcaccatggcggtgtgctgctttgcctgtgtttgccctccaaaatccactatccactcttcttgtcctgccctgtgccctcagataatggacccctatggactgcatcacctggttgggttaggtcaatgggagtcaccggcaggaaaatcgaggcaggatagagagagaggtcagtgtatctcttctctgctccctctctcctttgccattagagttctggcagtagccacgtccttccatgatcatagcacttgtagagcagcctctccatcctagtgccatctctcagggcctttgaaagaaggagttccttctctaactccttcaggccaaagggaggagctgcttcctgctgtcattactcaccaggtgcctcattctctcttatggggtcttttaaccccatctacacctccctaaggaatccaaagttccttcatttgaatcatctgatttgaattcagtttgttgccaggactcagatggatatagcctggaactgtgtaactgaagtacctggcatggagaccaggacaaagaaatctctcaataaatacttgttgaatgaatgtgttccagcttcccttgcagaaagtggcagaaaaatgcaagccagagtgacctgtaccctgtattccatagctgtctttccctatgaatgttaagcttatcaacatcccttcctcctgccaacctacacatgacacaattggcggtgtgtccacctttaatccccaaagcatgcatccccccaccctggcccaaccactcattcaacaagtatttatagagcttcggctgcatagaaagcattttaacaaggtgaggtccaggacattttgtcctgggattatttaggttgccctttgacataacatctatgcaactctatctgatggcaccttgaaagcatctatggaattttttttttttttttgagatggagtctcgctctgtcacccaggctggagtgcaatggtacgatgtccgctcactgtaacctctgcctcttaggttcaagcgattctcctgcctcagcttcccgagtagctgagaatacaggcacctggaccacgcctggctaatttttgtatttttagtagagataaggtttcaccatattggccaggctggtctcgaactcctgaccttgtggtctgcccgcctcagcctcccaaagtgctgggattacaggcgtgagccaccgcgtcaggccacatctgtggaatttcaaggagacactgagttcacctaggccaacattgagtcttggctctgtgggcagcaggccattagaactagattggtgtccaggaaaatgcaggttacactgatgtttacattaaaaggaaaatgattgtgaacaaaaaggaaaaaagacagggagagggaggggaaaggtgtaagtagttacgtctccatgctttttagtagttgccattaataatgtatttctcatatactccatttttatatagctgtctttggtcctctgcatggtttaaaggaaggtttcagagatcaatactcattcgagttgtaaaaattggttttctaccatatctatctttcctcctctctctctcctccacgcgcattctttaggcaatcttatttttggcacaactacctgaacatctgaaataggaatctccatcacaaccttgaagtgaaaccgtttgctcttgtataggtgaaagaaaatgagctctttaaaccaagacagaaaagctgcctttagagctccacatagagtctcctaactgaggcaataggatacgtggagaggaatgggattatctcctccggaaagcatggtttcaacctaatgcagaacacgcaccctcccccttcccctcagttctgcgcaactgctcacaactgtgctgtttaaaaacaaaaaaggagggcaggcctgggaggaggggtgaggcccagttatgcaaatgaggagccaattagcagagacaacaaaggggagatgcccgcctcagagtgccaggtggcagcaaggtgctaacaggaatcgggctgattaaaaccagcgctgtaggaagttttgaaaaatgttttcaacttctgccaaggcacggctaaaagaagcattagcatcgtgcaacatgaggtgactgcctgaacagcccacctgctgctcctcaggcatgggttcttacctctgttgttgaaagcaccgtgtcctcgtcaaggctgagcacggcgtctgtgatgatgttgtcgtagggcagaaaacggctgctcataacctgggaggaagtagaagtaggcagtggggagggaatgagggaaagaggtaacttcagagtcttgttttcaggacaattctcccatcctcacctgcataaagaatgcgctactatcatgtcacccctcaacaccgaaggaatctcatttcccatcaatgcagatgtatttgttcaacaattattgggcacctactgtgtagcagacatcttgcttgtcaaagagggtacaaagataaatcagacatgttccctgtctttgaagagttcatggtctgtagaggagaccaagaagcagatgaccagtctttgcttgatacaaaaaatgccaggagaccacaggatggagcaactagctgtctggaagagcaggtgaaggcctcatagaagtgacatttaagcaggaccctgatgggcagaaagaattcaccaggtatagatagtaatgaagtattaaagacaagacttggcagatgcagaggcactgagcagagaacctgcatcctgacacccactcttcccaaccgaaagagtgaatggatggagaagtgattccaagtgtggacacaaaccacggggagagcagatcactgtagaaagtgctgcttttacaaattacaaacatttacaaattaaaatatgtattagcacagattagaaaaaatatatacacatatattagcagctacagcaatcaaaggtaatattaaagttacaaataacttcattaaaatgagaagtatactgatttaaagaaatatattaggccaggcgtggtggctcatgactgtaatcccagcattttgggaggctgaggtgggtggatcacttgaggccaggagttcaagaccagcctgaccaacatggtgaaaccctgactctactaaaaatacaaaaattagccaggtgtggtggtgcatgcctgtggtcctagctacttgggaggctgaggcaggagaatcacttgaacccgggaggcagaggttacagtgagctgagatggtgccacagcactccagcctgggtgacagagtgagactctgtctcaaaaacaaaaaaagagaagaagaagaagaagaaagaagaaggaggagaaggaggagaaggaggaggaggagaagaaggagaaggagaaggagaaggagaagaagaagaaaaaatattaaataatagcacatatgatccatggatttagaaaaattgtgaaggtggtgtatgcataaagtttgggcagttctggaataaggaaaggtggactacgtgtgcacacacagtggtgtgtgtgtgtgtgtgtgtgtgtgtgtggtgggggctttggagattatggcatcagctggaaaaattgagggtggagaggttaccctgtgatagtcacaacttaaacctttgtgttgaatgtaccatagaggaactaaccataagaatgctgacaccataagaataacattttttgaacatttactgtgtgccaggatatgttgcaagtccttcatatatatcatcgtgtttcatctttataacaaccccattttacagggagggaaactgagatacacaggttaagtatcttgcccaaaacggacccaggattttcccccagatggtgtgactctatagagcaccttggccaccgggctgtatctgaatggaaaggacctcaaaagtgaatttaggaacacatatgccaatcatatgctcatcaccttcttccagaagttatagtaaggatgatgacatcctctctgaattcacacctgccatcaactttgaagagacaaaggccagggaaagaagcaacttaacactgcagacaaagggaaagaggaaaagggaggtacctagccagctgccagagctgcagtctccccaaatctgagtacccctaggagccagctcatctgcaggcctcatctcaaactcggtttctttgccggcgaagctaccagagcacctaggactttaatgcatggacagtggccactctaactcatctccaagagctcaagggacatagctgtagcacacatggcttcaggggttgctcctacacatctgtcaactgggtcaagttttttgttgttgttgttttctttctcaggcttttgaaataaaacacaaagtgatcagcaacctcatagacacagtgctcagaattctcagcctgaagcaatcctcctgatactgtttacatgtccactgactaacgcagaaaccattagctgccagcttagcactgccctgacctttcccttgttaagcccacaggggaaaactgcaaagacaacgcctataaattcaaaacagaatttttcagccaaagcagcaaatatattgcttctaaattcatggagatagagattttaaaatggagaatgaggaagatgtagggcttcttcctcatcatctgcccaaccacaggtcttaaaaggatctgtttcctttttttctgaacctgtttcatcaacagaagtaaaaagcccataagccatccattttcgaattctcatgcagaaatgagaggcttttttcaaacacattgcctcagcgaccttcttaaatggattagcatgagagaaaccaatgtatttacaaagttaaacctgagtgaactgggttttccttgttagttcatttaagaaaggtttagctaccatgtgaaagcccaactcctttaaaacgaacaaacatgttggccaggtacagtggctcccgcctgtaaccccagcactttgggaggcctaggcggtggatcacctgagtttgggagttcgagaccagcctgactaacatggagaaaccccctctctactaaaaacacaaaattagccaggcttggtggcgcatgcctgtagttccagctactgaggaggctgaggcaggagaatcgcttgaacccaggaggcggagattgcagtgagccgatatcatgccattgcactccagcctggacaggcaacaagagcgaaactctgcctcaaaaaaaaaaaaaaaattaacaaacatgcctaggaaatgaccaagactcaagaagtttactgtcttgtagtgtgtgtgtgtggggtggggagggaggtacataagaaatgtacacaaataattatataaaacacaataatagttaagatttattgagtatccacagtgcgcccacacttctcagtacatttatttatgtatctcatataatctgatctttttggctaccttattagttacatattatgactctttccatttattgaaagggggcatcgagacacagaggattagcaacttgctttaagtcacacaaaagtaattttgactttagagcccataatacaaatcataagattatgatgcctcccagaagaggagctaacatttattgaacccttggtgcatgtataatatgcataggactaagcacctgatatggaatggtcttatttaaccctcaaaatgggcccatgtcatagcccaggttttctagaatactgagcctgaagcaagacttaagtgcaaacgcttcactctgaggtgcaatcccagggcactgagagtcagggaaaagacataggaagaacccagcccactggattcagtgcccaaggtggaggcaaggactgaacaaatgccaggggcctgaatatagatgcagctgggaggatctgaggcatcttgtaagagacatctgataaagcccacgagaaaggtactattattatcaccaccattttataaagaaagaaacggggagtttcttttcactgagaatgaaaatataaaatcaatcagtgagtcagagcatgaaaatgctatactacctaaagaaatcagaatggctcccagacagactggattgtgtctgaatatcctgacatatccaaagaaagacattatccaccagaagcagagctggtctccttgacccatggaagcatacaaaacaaagaatcccaaagttcaacattaactgcctgcctctgagtactgttcatggcttcaggcattggaattggaacactgccattcctatgatgggctattctatgggggggatggatataagggcctgcatgaaactgtgcttatggtgagattgatttgtgagagaggcatgtgattattccaacatccaccttttctcattaaatgcttaccaagcagctctctaacaaacaggttgtttgactccagccttatgagagccatggctatatttgtcacattccccactgtgttccaagcctgttacaaggagctcagcacacagtaggcactcataaatggaactgaatagataatgcactgatcatcttgtccttgtgacagttacaattgcattatgtcaaaccatatgaaattgccacttttggtgagtcgatgatgatatcaaatggttcagcctaataaactgattttgtcattctggcgcaaaggtgtgagccactctcttatgacctgaccccttggggactgacaaggaaagttttttagatggcactgcttcaccaatctcaatttcatttagtagtgactatttccttcacaatgcgtaagatctataagtaacaagcagaagctagagaaaaaagagctagctgctctttagtagaagaaatttcaaggaggaggtagcatgcaaacgggggcttaaagaatatatgggaatgttgacaagcagagatgatgagttgaggggtggtcaagacttacaaatggcaaagtcaaaattagaggtaggaagagacacagcgcaattcagctaattataaatgatcaaatgtagtagggggcagggtctgtaggggaaagcaatgagagaaaagattggaaggctggctagggccaggttacacatggcctcaaatgttaattggaagcactagcaaatggagaaaaaggccgggagatgatcagaaagatagttcagctctaggcaaagtgaactggagaacagaagagaggccggctatgtagcactcatgagaatctttacaggcagatgccaaacaaaattaaggtgaaaatgtcctttttaaagtgaatgggagaaagaaacaccattctgatagacatagctcattcagattaatcagccaagcaaaccatcaccaccaccatcagctttatcttcatctttgtcatttacagaaagataactattgccagctcctgactttatttaatcctaacagcaaccctacaaggtatatattattgtttccactttgtagatgaggaaactgaggctcatagaggttaagtatacacacaaggtcacaaagctataaaagagttggtatcaagacccagatttccctgatttgaaagcctattgtggtcaaatctgagaatattctgagaaaagtacagttttagaaaaaataatccaggaacagggagaagatatctagggccaagacccaaagtgccccatggagaaaccaaggctccacagtggttccacatataggtccccttcgagtcttaccttgctctctccttcaatgacgacgacaggcacagcagtggcaggccagcggtgtttggctggtaggggcttgtcacaattccatagaactatgatctgaaagggatggggctcattagatggctggggtaggatgtatttatgtatgcctccaacccaaagcctcttctcagagacagaaagagaaagaggagctggaaatctcagcaagacaaaacggcagacatcaaaactgagttttaaagtgagtccattcccacacaacctcagaacattatcaccccaacaactggagagaggacagaaagagcaaacaaataaacaaacaaacaaacaaacaaaaccaactgtgtccgggaataggggaaagctgcaggaaaaagaattacggtggctggagcttaataaagtggtttcctaaattctgatatcttatgatggtgtgtgagataacaactctgatcaaattaaataaaaatgtatactgagcatctgaacatctgctctgaacttgcactacaccaggcaatgtgggagaaataaaaaaattcaagctagaactaagatgagctcatgttttgcatgctctagaatggttgctgattttatgtgactttataatttccaataaaggcatttagttcaaaaatgcatacttccttattgaattctttccttgtttgtaaaccttcttgtataaactaattcacaaatcagaaaaaccaccgttcaatatgggaggaacactgatttggaaaatattgttaccataggcataatcgtctgctcccaattttataattagtcatagttgctatgaaaagaaaagttgacacttcatgacaccaacaagtctgcttcttctattgaagcttagttgtctgggtcctcccagaggctttttggatgttactttatcattttgacatttaaaaacaaaatcatgtgcttgtatcttctttagagactatgttggtgtatgtatatatactttttaactctataccagtgctaaggtctctctgtaacccatcccttccctgtgcagatttcacttccaagaatttctaagtggatgaaaagggtgtaacgaggcaggatgaatgaaagggagtagcagggtatgatgttagagaagtcccggggagcctggggagcccgggggataacaggtaaggagggcggagtctctggtctggagctggagcaggcaggggcttctctgtcaacttcccgctcacctgggcacagtactgggacttggctgcagccacgagaagcttcaacactggctgggactgagagaccaggggggtcaccgcatggatgactgcagtgaatttggaggggggctttaaacctgaaataaaaaggagagtagagcctaatgaagcgctggaaagcaagacttagaaaattactcctccttgctccgctgcctcatgctggagcaaatgttccctcctggatgatttctcctttgcttcttatgtcctgacaggacagaaacaagatgaaaagctgctggttagctactgcctgagtctagagacctcaataaattccagatcaatgtccacttctaggttcttgctttgacatcctttgcccctcttggtgatgtttctgtgatgtccctttggctttttaggtacccagtgtccaaatacacacaacactcaccacccttcatgtgctgtctctcccatggtatttgcatgtgtctgatttttaattatgtaatgaaagggttctacctgactaatcgtatttcaaataactagctagtgggaaaaaaggtgaaaggaagagcatccagggcctgactgtctaggtctgaatcccagatctaccacttactggtcgggggaccttggaaagattacttaaccctctgtgtttccacagctgggaaacagacctgatagtaacagtgccaaatatggggttatcttgaaaattcagtaagtttgtctgggcacggtggctcacacgtgtgatcccagcaatttgggaggctgaggcgggcagatcacttgagaccagcagttcaagaccggcctggccaacatggtgaaattccgtcactactaaaaatacaaaaattagctgggcatggtggcatttgcctgtagtcccagttatcgggaggctgaagcaggagaattgcttgaactctgaagacagaggttgcagtgagccaagatggtgccgatggtgccactatactccagcctgggcaacatagcaagactccgtcttagaaaaaaaaaaaaaacttaatgcatacaaagcacttagaacaggacttaacaaatgacaagtactcaatatatgtcagcagctaccattatcatcaccctcaccaacattattattttggagaagaagcctccatattcccagaatctcttcttcgtgtagcagtgatatagctgagaaaaaaagtatgtgaggcagacttttgccagttgtgagctctgaagccctaggttaaaaaggatcatagatatgcaaaacaaccactgtcaccaaagagacagaagtgagatggcttccccccaaggagttttcccataagaactcactaagaaattagagacaggttaagagccttttaaaacttcattagtttagacccactaatttggcactttagtggcttaactgcgagcaacacagtgcagggacattcaagttacgctttgatactgatgggataaaggctagaatcagactatatgtgtattacaggattatacaaaggttttgtagagaaaattatatcatccagcagcactttaattgtatgttagaaagaagttaaccttcccaatatctagatacatattcaaagttttgccgagtaagaagaataagcgtgattgagggattgccttttaaacaggaacgacaagtcattgtctttaaattttcctgcaatagtttaagaagcatcatttatacacctctaatgtgctaactccaaaggaagatctaaatattgtacaagaaatatacagaaattcttgtcaaccagtgccttaatctgacaatttctaaattctgttacccaaatgtcaacaatatactgaattagagatggttcccataacaggtttggtttggattaaaaggtgctttgtcactggttgatgcttcaggccatgcatttctttaggtttcatctcatcagtttcaaactaaacatgtacaacttaaaagggtgagggtgttacggagaacaacggcactgaatggaaaatcttgtctttttgctgtatcagcttggaagatgctttcctgtcctaggctttctcaagtttagaactgtaactgatgggaaatgttcatgatgtttctaacatgagagcaactgggggtccaaatacataaatgtctaaggcaataacagtagccggtggtagagatttatccctccgccattcccttttccctactgtgattagactgaaaaccgcttgaaagcagagattgtatcttatttgactttttatttctagtacccagcaatacattagcatagcacatagaaggagcataataaaccttggaaaaatgaataaatttgtgcttgtcacacattcttagttatttctcctttcctcttattcagtttttctttggtaaggaatagagatattgggattgtgaaaaaaaaaattggggagagctctccattttatatatgatgaggcttaaaatgatagctaacccattgccatgttcaaaatgatccataatttggggagcctatttctcaaaaagaaataactctactaaatatgaagtagagctgcacagataagaagtttttctttttttccattttgcaatgctctgctctgtttttgaacttgatatgtcacttataacaaggctctagaaaaagcaatcttcaatgcagggtgttagatggaccccattagagtagaagaataaaggcctttagttctgtatgacatcttcagggtaaacaagggcaactccctggaggaaattcacttacctaaattagcatagtagtaaggaaaatctcccagataagatgaatactgtggtagtacgaacaatcctccaggatgtttgttccatattaaactgttacgtgatatgtgcttgaatattctgtcctgaataatctagaaaataaaacatagcacacagtgaggatgagatcctgatgatatttggaaaggatgatgctcaatccaaattcgaaagatggtggcagtcagagtagtgactctaccctccctcccactttaattctccggataaaaatgtctgcaagacagagagagtaatggagcaatgaaaaagagtgagagaaacatatgaattatagccaatcaaatttcctaattaaacttcagttaaaccataagttctatcttgtctttgtataataatgagtccatgctcattccaaaatagactgtgtggagcagttagtctttccctgatggttaaacttctaagaactaagataggttccaggcccctatcaagaagatctgttctcagagaacaagagaggtcaatgtagacctgtagatgctaaacggaaagcatattcaagacatgacacattctagaagctattgaggttttcagctgttcctttaattcaagaggtagatgtgtatacttgtcatatttcattttcctttcaaagtcaattggaggactttgggtgctggttactgaagtttttctatatttcatcttgaaaagtagtgagttaacaattgcttaaaacatcctacataataggacaagaaccatggcatatgaagactaataatagccaagctagttcattagtttctttggactttgggaccttgcagatcattaaattctacatttagagtcaaacatcctcccatcccgaatcatttgtcagttgaatgtgattagtccactttatagctttctctctgtgactttcaaactcttacaattataccatccactcattagaatatgatttggcaaataattaacttggtacagaattttatgttttcagcaattttttttacattaaaaaaaaaaaagaaaaaaatcctgccgtaagttttaagacatttaagacccaaatcaccattttccaggtctccatttaatgcaatgtgattttaagtacagactattttaaatggagttttattatttgctaaggttattaacaccctcatctcattccacatggtgactagataagtaataaagtgggctacatttatctttgcaaatcttatgtttattttcctaatgacagagaaggaagcaaggaggaaattcaaaagaactcaaatatcttagttcaatgatttctgcatcttatctttcacccagatcaaaactgctaattttatatggctggatagaggtttctaatttggtggagactttaggaacctagtgaaaatatttatttttactttttgtggtacaacagggatatgttaaaatgctgttgtcttggcattaattatgagaaaattgtcatagttgtgaaggactttttacatggttagcaatttcactttgtacaacatttattcctgctttttattatttgtactttccaaacgtactgtctatttatttcctttttatagtttctctttagatcctcctttttttgtttttttcttttcaaatttatgtaccttttaggatgtggtcacttaaataagtttggatatcaagatagaaaataaattgacaatagacagcattataaatcgaacctacagacaaatatcatggaactcacagctgtcacaaaatgggtcatcattcccatcaggtctttggatggtatgcttgtcattgtcatagactatctttttggttcggcatcacaacattgttatcttttaaaattcaaagatatgataataagatatagcactcttctgaaataacaacaagcattttatactgtcttccaacggatcttgacagaaagacataggacaggtacgaaagcagtagcaaatgttgaatttaacgtgggtcaagcaatttgccacctttgtgtattattttcctcatttgtaataaaacaataaaataccacattaattataacaacgtctcagaatttaagaatagctgcctaagttgttatacttaaggcttgatttttgcctttaaaaagaaactcactcctgtgttcgttttctaggcattggtttttccatttattacatagtggtaatagtatagatattacataatacagctatttttacatattaatagtattcatgattcattattcttaatgaccagtttagcaattttttccatgcaaagcaatgaacatatttacgaataaaattttccacatttaggattgattattcttcttcttctttttctttttttgtttttgtttttgtttttgtttttgagacagggtctcattcagttacgcaggctggagtgcagtggtgtggtcatggctctgtgcagcctcaaactcctgggctcaaaggatactcccgcctcagcctcctgagtagctgggaccacaggagagggtcaccacacccagctaattttttatttttattttttgtagagataaggtctcattatgttgctcaggctggactcaaactcctgagctcaagcaatcctttctccccggcctcccaaagtgttgggactacaggtgtgagccaccgctccagaccagaattgattctgtaggaccttgtcaaagggtataaatacttttaaggctattcattagtattgccaagtgtctttctaaaaggtttatatcaacttgccttctaaaagcataaagaaatatggaattcatttcaccatatagaaagatcatttttttccctctgcaattcttcctatcactaccctggatagctcccagaatcttttcatggcacttagtgcttagtctttattgtggtggaagaagacatcacattagaggttggatgcttctttggctataaacaaaatcaatacacacacacacatacacaaacagataatacaagactttttttgttatggtcctagatggccccctcgataaggacaatatttctaattgatgtgaattcaaagggaagaatgacaggctccttattttacttttatgtatcctctgttttccaaataatggacaattggttataggttaaagtcattctatgtagcccttcatcttttaaccagagcactgtagcctaagatacacgatgccaccatatgccacctcacttgaagccagatcaattgtctatttccattaccccattgatttttaaatatcattgtatgatagcatcagcaatactatggttcgtatgtgcatgattagataactgaggaggaaaatgaagcatacttcattaaaactccactaactatataccttcctagctaccactggctcttttcacatattatcataatctcaggcactttctttcactcatcttgattatgactaagctccaatgattcaatccttagtgcaggttattgtgcaatattctgacaaataatggaatccatgaaggagcactgtttttgcagtgttttttcattgtcctcattgttagttctcaattttcacaaaagtactgagctctacagagcctagtttgattaaatagctccttattaccaagatgcagcattagagaatttcaatcaaactggaaaaactaaaagaatcctagacagagttctgtacaatgaaacgtactaacaacctgaccctggcattgaagagaaaatgagatgtcctgttttcaactgagtctaagcactctacctacaactctagggctcataattgctgaagaccccataatcccattcccatggcttagaatataccaagcaaggagaaagacctagagtctgagtacagaacatccttagcccaggatcttcaactctatgctgtaactgtgagtaactatgaattattctcgtgccttagtagctccagcagtgactaaatgaagtatattatctaagttctaagccaagttcacatctttgatacgtgatacttaaattgttcttataaacacatttgctgtgttatttgtatctgtggatggcattttcttctatttcccctgattttttgattatgttgaattctggggtaatctgagttatgaagtattttgggaaactgggtagtacctgtcatgcaacttggttgagaggtcaaactgttacaatccaatcttggaactatataaagagatttgacagttgctataaattcgaatgaagtgtatggtttttagtgtttaaaaaaaccccaaaactgtgttgctaaaaaaaaataataataatacatggtttaaatacaaagggaaaaggccttttcaggttcagagatgaaaacagcttgatcttattttgatcctattctgatgaatgtaagacattcaactgttacaatagaaaaattgagaactgctaacttaataggtgagagaccatattcatgcaataaaccatatgcaaaagacatgtaattaatgagataccatctttcatctggcaaatcagcaaagtgatagatgtgtgtgttttaattatggatctgtaagactgacaagagcacagcaaaagagagtcacgcccagacagcttgtgagattctaggtggatataatgtttttggataataatttggcaaaatatattataagccttagaaatgcctaggctctttggctcattaaaatcacttcagggattccatcctaaagaaatagagatgtagtttaagatacatgtagaaagtcattgcttagataaagatatagttatctataaaaaataaaaagaacattaatagtaaataatggcatattggtttaagtaaatagaagttcacaataggatgcataatagagtaaaaaaaattaaaacactggaatgtgctctggatgtattagaggtaaacaactaataggatagaattgaaaggccagaaacaacccaaagatacataaaaacgtcatgagaaaacactgaagaaagaaatgtattggggctgggcatggtggctcatgcctgtaatcccagcactttgggaggccgaggcaggcagatcacttgaggtcaggggttggagagcagcctggccaacatggtgaaaccccatctccatggcgcatgcttgtaatcctagctacttgggaggctgaggcctcagaaatgcttgaacctgggaggtggaggttgcatgagctgagatggtgccactgtactccagcctgggggacagggtgagactctgtctcaaaaaaaaaaaaaaaaaaaaaaaaaaaaaaatcttaacatttggcatattatttgaaacggacttcaaattcaaggaatttatcctaaggaagtaatattgaatctgcacaataatttgaccttgagatgatttactgcaatgatgtacataaaggaaaaaagccagaaacaactggaatctacccaaattggggattaatttaataattagatgatatcataaatggaatatcatatagtcattaaatggagaaaaaatgtaataacatgagaaaatattaacattattaagcagaaaaacaggttacaatgcaagtatataaagactcctttttaaaattaaaagtacaacaaattttaaatttacatataaaaatgaatatatatgtttgtggggatatatatatcaatagtggttttacatgaatgaattattttatattttatgctttaagtgttttctattagtttctaaaatgaatgtatacttctttaataataactcctttaatcccaccaatttgggtagtcgaggcaggaggactgcctgagccaggagttcaagaccactctgggcaacataacgagaccttgtctccacaaaaaatgaaaaattagccaggcacagtagctcgcgcccatggtcccagctactcagaagactgaggtgggaggattgcttaaggtcattccagcctggtgacagagtgagatcctgtctaaaaaaaaaaaagaaaggcactctgcactccaaaaagggagaaacaataacattcaacattctttaagaagggcctaggaaggatcttagatggaggacaggattaaaaaagcaaagggtaactctattagctactgtgaacagaggtaacaactcaattgattttaattgaggagattgcttttggagggataaaagtttgcttgcaggaaggaagcccttggaagtcattatgatcctgtccccttcatgggaatgggcctgggtcttaaacagccccttttacccagttccaggatgaaaaaaatacacactatgcctaagagaacactgaccagagctcgccctagggtgggagcaggagcccaagctcagcatggggtggataaatgccctggtgtgcctggagcatgaccagcactggctctgatagtcaggatggcaagaaaacagcgatgtggaccaagtagggtgacttcagtttcttggtattactcagatttctcagtgtaggttccatattacattagcttttagagcagtcatcactcttccagagtgaattctccaaaaggaaggccacaatgcccccacctcattttgggacacctcagaatcacctcaacgaagatctctgctctcctttcttcaagcttgtaatgcatgcgtgtgcagtttcctgaatcttttcctagctctttgtgctacttcggtgtagcctcaggccaatgctatctgctctatttccaaaggttttaatcatctccatgcttcctttttctttttccgtcctgccttaaaaaaaaagcaacttgaggacgggcgcccatctgcctaaaagattttctgctttcacaaatttaacactttctgtgccacatgggtatgatcctgattctcctcttaacacaactttgccacattgacgctggttggctggcttgcctaagtcttgagaattctgctgtcccgcaatgccattggactgtggtgcccagaaaactactcatatttttggaatggtagaggatttgcccttacttggccattatatatatttttctttttttttttttttttttttgaggtggagttttgctcttgttgcccaggctggagtataatggtgcaatctcagctgactgcaacctccacctcccaggttcaagatattctcctgcctcagcctcccgagtagctgggattacaagcgtgtgccaccatgcctggctaattttttgtatttttagtagagacgaggtttcaccatgttggccaggtcttgaactcctgaactcaggtgatgcacctgcctcagcttctcaaagtgctgagattacaggagtgagccgctgtgccaagccattaaatatttttttctaaatgaactccagaaatatgtcttcgaaggatgccattgagtgtaaatgacaagacagtcatgacccacatatccctgaaatgatgtaagacagagtcaatctctgtgtcaataagtataatttctccccatgtaggttttcctttgtggagtttgtcaggaatgagagtattttcttggccatggcaaagcaggtaaaagaggttaaccaatatatccaagtacaggaatctggttttgccccactggaccaatcacacatccctaatagcaaaacagaaggctgagagaagtgtataaaggaccattattcaagcccaagagccaagtggtctcacttacctctagtgtagttaatacaatcttctcaactgaagaaaaataagcctcccacaagaattgtgtctgctgtctaagtgctaggattttatcctgatgaatagacctgattgtagaaggaatctgtaacacaaggtgaacacataggaattataactgtaaaacaaagagatgcacttgatcaaaataacccaactgggttaggcttttattcttcatagcatttggcttctagcatatagatctactaaaaatcatcaattcctaagttgaaatgaccttaagaagtgtcagctgcaaagagcacttactgggaatccaccccaatggcctttgatgtatgaaagttacagttcacctctaagattcagtagcaccttatcagttgcttaggttagtctatagtcacaattgctgtttccagaaatccttgaccttgcacatgaacaaccaaattttatagaggggtaactataggtcttggggaaaggccagaagactttatctcccaagcacttctatgattggtcaccccaggaactataaaatatctataaaaggactttttagagaatgtctatgagccttcccatccaatctgaagctagggtcagtcacttttatgtgcacataccttctacctcacctttgagcctttctgctccctatatctctctttctgccttcagcctttacccaagtctaactggatctctcaattgttcatatatgattagccatcactgctctcttccagggtatacaattttaaaggaaggacctatatcttgttatcctgctacacattttcaggttagcagagtggattttatatagtagttattaagaaataggaggtgaatataaccatctgaagccaccacagggacgtcattatttttaatggtagtataactgaatggtcaggcacaggggcacagaagtcagaaagatcaaggaaggagtgttgcctctagcagcatttactacctgtgctttcttgaatgagttagctgatttctcaaagactccacttctttacttataaagtggggataaagtactaaggttttaatgatgattatataagtgcttagcacagtgcctaaaacatggaaaacttaattaatgtaacatcactactattatcattattggtatcagggtgatgctattaaaagctggatcaattgcttaatgtttgcaagggaacctacttgggtctggagctctgaaatgtacttcctgagtctggtaagttttctgggcttgttccctattttcacctacagttcaaggtctatttcatttacggagtctatagtctttagggaagattccttgtgatttgcaattgcccttttgtgctcacctctttctgcatgcttgcctccataacatatgactaatccgacagatatgggagtctgagcaagaaggagaaatgctccgttagctgctttaataggaaagtcacccatggcatttgactaagactgtaacagagtttccattggaggggaaggaagtggtagcacattttttaattcagcactccccttaggaggagcaataaaatagcttcacagtaagaacagaaggaaaagctcacttggtttgacaatgtccaaaaccagatactaaatctgtgtcccaaagtgtatacctggatttgcaacactgaaaaaacagaggcaacatgtaaaggagaaatactggcaggcaaacattagcctgtaatcagagcccaaggtcaaatggaaataaaacattctttgagaaggtagacaaatcatttatatcatagaacctttatcagtgcaaggaaacttatttttagttactcactgagaaagttacctagatggccaaagaaagattagaaaaaaactatcctgttcaattttcataatcataccctcttctaaatgtcaagaggtaactgctaagagttatataggttggcatcactgttttatcgtagccacaaggaaacagtctattagaaaaatgcctaaggccgggcgcggtggctcagcctgtaatcccagcactttgggaggccgaggcaggcggatcacgagttcaggagttcaagaccggcctggccaatatggtgaaaccccatctctactaaaaatacaaaaattagctgggcatggtggtgtgcacctataggcccagctactcggaaggctgaggcagaagaattgcttgaactgggaggcagaagttgcagtgagctgagattgcaccgctgcactccagcctgggtgacagagcaagactgtcttaaaaaaaaaaaagaaaagaaaagaaaagaaaaatgcctaaagctgtcattgctatatagtctccagaaaattgagtctgctgtggttatgaaaggagaaaaggaatatcacagactcacctaccaatgctgttcccctctcttaaataacatgcatcttcatcttactacatcaagtgcaatgtattctaccggcttgtgatatgatacaagtgtctgacagcactctgcaaagtgctctggaagacaactccaattgattgaaaagacagagttccaagttttaatggcacttggctattggttattaatctgcttgtcctgagagacaggtatgggaaagtgataaattaattccaatttggctggattgttttggaagttgccgagctcaatgaagtcttaataaaaggtcatgtatggtagcaaaacaaatggaatgcaccagaatagatacaagaaagtcacattaagctctcttggtgacatgatgacaagaatatatgcaaataaaaacatcccagctgttctaaaacaggaaataaaaaattgtaacataacaaaaaaacatttcccagagcagacatttgggctgggtgccaactctttaaaaccattgttaatgatagtacacagttgctgctcaatatggaggcagctgtgcaaagacagactgaatatgagaggggaaaaacaccagcaagtctgggtgggtgggggtgacaaaaatcaaaatctttagagtcaagccaaaaagttgcttcagaaggtgaaatgcccatcaagtttggtgaaatggtagaaactggacaagtggctgggcgcgctggctcacgcctgtaatcccagcactttgggaggctgaggcaggtggatcacgaggtcaggagttcaagaccagcctggccaacatggtgaaacaccatctctactaaaaatacaaaaattagctgagtgtggtggcaggcacttgtaatcccagctactcgggaggctgaggcagaagaatcgcttaaacccgggaggtggaggttgcagtgagctgagatcatgccatggcactccagcttgagtgacagagcgagactccatctcaaaaaaaaaaaagaaagaaactgcacaaccacaattaagtatcctaaaatgcgctccataccaaagacaaactttcaatttgttcacatcaaattcatgggagcattggtatataaaaggaaaattatgggtggtgttttttattccctttatttctcaaatttcttttaatgatcatgtattatttttaaaataacatttgaaaaaggaagaaaaaaggctacatggacaagcacaacatgcatcactcttgtttggcttttcatgaataaatgattttagcatacactatctctgcatggggaaaactcttcctcagtgtttctgcaaggacttcttttccttaaggaatcacagtgggaaatcattggcataaaagtggccctttcacaaaaactccagacccctttctcaatgaacacctaagaaattaagttgtattcagggcagaataacttattcccccaaaaacagattctgtcacattcctcctttgtttctgagataatagggactatggagatcacaaactgagtgccagacagaagtaatgtttcaggagctgtggtcactttagtttgcttaacccatgggtctctcagttacagttagttcatttgttattttagggaaagtgctgtattacttcagcagtcagctagcagactgggcagcagcacagaaggagaatcaacaacagacttaagaggccaggcgcggtggctcacacctgtaattccagcactttgggaggctgagatgggtgaatcacctgaggttagaagttcgagaacagcatgaccaacatggtgaaatcccatctctactacaaatacaaaaattagccaggcgtggtggtgtgcacctgtattcccagctcctcgggaggctgaggcaggagaatcgcttgaacctgggaggcagaggttgcagtgagcagagatcacaccactgcactccagcctgggcgacagagtgagactccatctcaaaaaacacaaacacacacacatacacacacacagacttagaaactcaatttaatgaatatccaaaaactaaaagggcaaagacattaaaaaaaattctacaaatatttgtggtaattcaaagataaagtgtatggtacaacaaaagaaaaacattaaagttctagaattttaggagaaaagagcacggcaacttgtgttgatcctaaaatatgaatatacaaagggctttagaaatccttagtaatttaaaaaaaaataatacatgatcattcctgccctcagatttttctgagtatcgtatccccctccctaggcagctcttgagcaattcaaacttttattaggggctgctcatttaaatataaatcctaaagataacactcgctcagacacccagactggatcatttgaggaacgataacactaattacaagaacaagccctagagacctctctctttctgaaaattaatctgaaggcaagtgcagaaacagaggaaaagaatatgaaacagtagggtagaataaaaactctctggtaatatttctaaaaattctggttattgaaaggggtggagatccacttcttcttgaaaatcaaagctcccattctttacctgcaacttcttttcagaatatattctggggacctggggagattttgttggaaagtgaacaatgtcatattaaatgacttcatattcaccatgacacaggtaattttctcctgataagatttcttttatagagctgaccttttggattcatcttctttgaaagtttggacgggggcagcaataatctgctgatgtgttgaaggccacagccccttccttacctgtaataacaatctctcatcgcctatgacggcagcttggttccaattaatcacttcagagaatggcaactcccatccattgctgagcatcacagggacgcaggcagcctgagcaaaaaaggggacttcgtgaatgtgaggaaagcgacagcagaagctgttccaatcagaggtgaaatcagtacaaactcaatgactggcatttttgacactgcatgaatcctggactgcctaggccagaaggaaaggaagcttttatgagttatcaagtcacacgaaggttgtacgtatccagactagattttaatatttgcaagtcttgccctagaatgctaaaaccccatttctattctagtacatggtttggctgaccttacttccatagagacgactggccttgctggagaagtttttattgacgtaacaaaagctcgcaccaacaaaatctgagtatagaaccaaccttgaatataaacagtctggtcaacgtaactcccacaagtccacgtgcaaagtggtttaccccaatgtcatgagcaacaaagagcagaatgaagctcagcattcctaggcagcagttcgtggacttaaccagtatagagtgttcacatttcccttgctctgcaaacacccaaaccagaactttgttcctttcagtgtggagtgatctaaaccacagtcataccaatttatggtctgtgccgggaaataaacagccaagaaacactaggttaatgacaaaatactgattccaaataactcataatccaaatcagagaacaatttttctttatgcagcatcccaggaggctacaagaacattagtgatggcatgctatgcagaacacacacagagagcaacttggaaaagacattccagagaaggaagctcttctgttggagggcatgacagaatgatttgcagttaagatggcagagataagaagttatgaggcactgcagcaaaagcacagatttaggcatggtgcagggcaagaggaggaaagaacatagtagcaaagggtcaaggaatggaggatgagagaggttgagggcatgctttctctctgcaatcaaagaaggctggttgcaacttccaggtgggaaatgtggatgactgtctcaagaggacatttctgcagagtgaggttgatgagctgagaaactcccaccacaaaggctccagggctggagccaggacctctgaactgcagagccttggaagagctggatcatctgagtagtaccaccatgctggggatcattctcaaaattgaaaggaactgagagacaatgaagatgcaggcagaaaagacaattttgcttttagagagtaccacgaataaagggaaagtgtagggctgctttttagagtccagctaggctgcctggtaggccaagctggcaattagatttgccttctgtttctaaacatgacccagaagaatccaccatttaatttcttacatctaaaattactgagtaaatcctccctccacccctcacttgtcaaaaatgttttagattttcttgaaaatattttcagatcctcaagggaaaccacaccttctctttagctatcccaggagaggtgataatgttaaacccacttaatctggcttcggtcctcagccctattctgggaaggctccagggcctcttacctgcaaagcctccaggaatctgaaggacccaagcctgcgaccacgaggaaccagacagaaagtggcattgtgcagcatttcccgataatcatacctagaaagagaagaggagtaaacagcaaatgaagactcattgcgaatgtggggatattgaccataggtgggcgcccatgtgcatgaatttacgcaaagcaactcgggaaagccaccagcaggcagctctcacttttccattttgaggaaggaggttgggttgctgcatgaagagtaaacatgaatcatcatgttggacaaagcaattaggatcccttttgcaagcagtatatataaagacaagtctgatcgttctggcaacaatttggtttgcccagtctttgcttccaaaatcagatttttaagtcttgataaaatatgttgccccatagtcttaaaaagaagaagagaaaattactggtgcttctccttctcctttaacaatacggcattcagcaaaactaagactgttcttgttccccaccccttcaaaaccatgctattaaaaactattcagaaaacctcaatcacaggcacaaaacaacatttgtcttctctttcaagatggagtttctacacttaaccaagaacgttcagttacccaggaaaaatattcctgtttaagaatggctgacataactcacaggagaaagaggaggtgagagagaaggatgctagcctaagaaagggaaagaaagaataacgagaaaagaaaagaaaaaaaaaaaacctgaactaggagggggtacaggaaactggtctacagaagagatgaatttattttactcaaataccatttaatgatattacattgcttttgcttttcgaaaaaacatacaaaatatgagtgttacctgtttctttatgccagtgaagtttaagaaagataaaaagcatttcattttgtttaggactgtcacttttaaagtgattaccacaaacacattcctacacaggcagtttcaagtacattatgagtttaagaaaacttgggaaagtagagatggctcatgtcctgtaaaggccccgattcttagagccaagatgaaatcactctcatttttcaagagcttccaatgctgagcagacaggtgtgactttgacagtagcatatgtcaccaccactttctgactctaatagtctaatttaatcatagcctaaaggcactgaattcttccctcttctttttgggtatattggtatatacatttatatttttaaagtccacatctatttttatattctcatacaaactaggcatacgggagtaagccaattttcaattataaacccgccattaagaagagacatcatgcaaaggaccatttgcttaaacaagcgtgtacaactaatttgcacaagaaaaggtcaccgtgaatggattaagattatctccattgagagtaaaaattttctaaaacccttgctgcattaattaaattgcaaaatagacttcaaagtaaaaaagatttttaagaaggcttgaatttagttaaatataaaaaaaaaataaattagatggtagtgatttcttcatcctcaccaaacacaggaaaatggttgacaaatatcttcaagttcaaatgttgataatgttttaatctctgcctaatagatggagcagagagaaatatgcacacacacacacactcacaaaaatatatgcataaagtttaagctgatttttttttaatacagaaaggtcgaatatacttcagactacagcaaggtttaataagtacccagaatagaaacccctgagggactagcacagaaggtcccacattctcatcattagcctactaaaaatgtaaaatcctattaatgttctgcattgtaacaagtttcaaagttcctagttgcagaatttactttagggaatgtgtggaggaagaggaagggcagaaaacttataggaaaaattcaaatgacagttatagtgggttgcttaaatggttacatagaaggactatttgctgatatagcaagtaagattgacatgatcgaagcttgtattccttcacataataggtaataggagctgtgggaagaatacccttgcaggagttaggaaaccactaggtagctgtgagacttaaaaaacccatgaattttctatctgtttcctcatctgcaaaatgaactacttgggctagatgactatagattcagttttaatacttgattactctttatcttatcatttttgggtaagaaagaggaatgtcctttgagaatatcccactgcttaggtgtccataccattatatgtatgtgtatatgtgcacaattccatacccatatatgtgtgtatatgtatatacatacgtatctgttcatatgtatgcagtgcatgtctaacatatgtgtgtattcacatagaggctcatacagaacatgtacactcataccttagaacaatgattttcattcagatttctatgcatgctcagcctgtgaaccagcctctctattctactctctggacagtcaatctatgaattactaacatgttctacctgaaggaagaatgatgccccacaagtgggcagacaactattctagtttgaccacgtgcttgatcctctcctactcagcccattgtgatgctctttcacactgcacatcaacctccttgtagatgcttaaatccactcatttattcattcattctttcaagaaatactatgtttcagacactgtcccatttcaacagatagagtccagagaaggtcttctctagttgctggagctaccaaagaagcacctgacaatgagaaaatgctgatgagatgagaatttaagatataaacatctcctgggagtatttgcattataagaggagattatagaaggccgacctttcagaagatacacaaagaagtctgtggccactctccccagcaaaacagcaatttagtaacaatcataaaaacattttaagtctctgagaattgtcctaaggggataatgacaaatagagaaacagtcacccaagaaaatctaccaaatcttggcaagaaccatgagagtctgtggcatctggtccctgacctgttccatgaccaacccctactagctctgccttacaggagctttactctggggcagtgcagtcaggaaggctgggctctccatccccccaggtcccatcaagaaagtgaaaaagagcctacagaaagagagaaccaccgggcatggtggttcacacctgtaatcccagcactttgggaggcccaggcaggcagatcacctgatgtcaggagattgaaaccagtctggccaacatggtgtaacctcaactctactaaaaatacaaaattagctgggcatggtagcacatgcctgtaatctcagctacttgggaggctgaggaagaagaatcacttgaaactgggaggtggaggttgcagtgagccaagatagtgccattgtactccagcctgggcaacaagagcgaaactctatctcaaaaagaaaaaaaaaaaaaagaaagagagaacgtatttgccaatcatatatgataagggactttcatctagaatacataaagaactcttctgactcaacaataaaaagataaataatcaaactttaaaagaggctaaggatttgaataaacatttttccaaagaagacacacaaagtgctgctaaacacatgaaaatatattcaacatcaatagtcactagggaaaagcaaatcataactacaatgaatgagataccactttacacccactgggatggctataagcaaaatgacagatgagagcaagtgctgatgaggatgtaaagagattagaacccttcatacatttctagcaggaaggtaaaacggtgcagccacttcgaaaaatagtttggcagttccttttcaaactaaaaatggacttaccatatgacccagtaattgcactcttgggcatgtatcccagagaaatggaaacttattttcacgcagaaacttgtccacaaatgttcacagcagtttgtctgtaataaccttaaactggaaactacccaaatgtccttcaatgtgtgaatgattcaacaaattgtggtacatccatagcctacaatccttctcagcaataaagtgggacaaactattgatacacacgacaacttcaaggaaattatgctgcattaaaaagtcaccctcgaaagtgtacatactgttgaatcctttctatatgacattcatgaaatcacatagttacagggataaagaacacttagaggttgccattggttggggggaggaggaaagacagggagacttgagaggtcaaatggggggacacagtgttttaagatggactaattctccctcgtttcttatgtttagaaatgtgaatcacataatcacacactacttaaaagaaacatatgatatcctaagcaagaaggtaagtaggtgagggagacaactaaccccagataatttgccactctaataaatggttttgctacccttttcagatgggcattaagttccccacgtgtaggtaaagaaggacaaaaggtagaagaattttcacaaacgactacaaagaaaaatgcaataaaaatgacatgaccttgaatttaacctagacactagtaccactctatggccataatcattttatacttaaagttgtattgaacaatgtatgggatgcaccccatttaaaatggactatgcaataatgcacaattgaagtcctgcccctctgtaggaaacacatttttgctggcagccattctgtgcaactgggaaagatgggggagtgtagcatagagcaggggttctcaaagtgtgttcttccaatcagtggcaacatctgcatcatctgggaacttggtagaaatgcaaattctcagcctcacccaaacctgctgaatcagaaactctgggggaagagcccagaattctgtgttttaacaagccctctggataattatgatgcaccctaaattttcagaaccactggcaccatagttaagagcttagtaattaaaagcttagtggttaggcagcttcagacacagcaaaacctgggttcgaattccagcttttcaatttataaactgagtaatcttgagaaagttatttaatttgtttaatcctagtttcttggttggcaaaatggggataatacttatactgtgaggattaagtgatacattttaaccaaagcacgagcatattataagcaaaccataaaaggtagctattatcattatgactgaaggaagataacagaacataatggaaaacacagccagcttcaagttagaaaatctgggctaaggaatttgggttcttgatctaccacttcctgtgtaaccccagcaaatcattcaacttctccaaacctcaaagttttgaagatcaaatgaaatcatgtacattgaatataaatggcaaagcactatgcaattgcaagttattatggtaaattatatcagaataagagggatataaacatttttaaaacccctagtaacaattaaaaagaatgaaaactacaccagtatcccaaagacagagccaagagacaaatgtggaacagaccctttaaagtaaaatggaaacagaagctgtgaatcacaacagaacagcagcttctaattgaaggcttttgccttattatcaaaagctacatagacaaggatgttgctggtgcactgtgctcacaggtcctcctgtggctcccacaatccctctgtagcacgcatatttgccaagtgaacctgctttttgctaaccaaagacgatagggaagaaacaagtgatccagcctctcatctctgtactcacacaattctagcctccccatgatgttgtcacagtttgtctcaagtatttattcataaagtaacttaacatctacagctgatctactccctccagtccccatcctcataagtaattaatctttccttatacacaagtttgaataatatcccttaagaaaaaaagaaagaaagaaaataaaaataatttatgactgttgtagttctctaaagtgcatggggatgagagaaatgaaattaacatcctttgagcacctccttgcgcctttttcattcattcaccaagcattagttgaatgtctaccatgtgtcaggcactcttcagggagctcactgtccagaataaacaacatgtgttatcaaatgatgattagtcagcgagaggagtgctaggattggacatgaggtagaggtgggtgttatacagagaagagaagcaatggccacatgtaggcagggaggcctcctggaggaagtgagaccctgagctaaatcttaaaggatgtacaagaagcaaccaggcacaggggtaagaggaggtgatgggaattcctgggggtagagatagcatagcaggaacaaaggcaccaaggtgagagaaaccacccagtttggggaggggaaggtatgggggtgtgggctgctgttactggtgggttgccactaggaaggctttctatgacatctcctagagctcagagatgatcccttgcaggtgactggggtgtcactgaagggcttgagcagaagaatgacatggtaccaatggtgttctcaggacttcatataacccaatttcatagagaagcaattaagtttggagacctcaaaaacccttccaatgcaggtcacagctaggaccaaccagcctgtgttccaactcctggatttctcattctaaatcccattttctttccattacatcacattgcctccttggtcagcccatacaacatgcagtgtctaaaactgacatgtcttatgaagccaggtcctaagcagttcacctagtttcaagcatgggctattcgttgccaatttaaaagggctgtttctctcccattcaaaacttcaccccagatcactaccaggagctcagtttaagaaggtactctgtcatctatttactaaccatgttgccttagacccttccttggcctttaaaggtttaacagtttaaaatttcaattactattattattattattattattattattattttgagacaagatcttgctctgtcacccaggctgcagtgcagtggtgagatcacagttcactgcagccccgacctcctgggctcaggcaatcctcctgtctcagcctcctgagtaggtgggactacaggcatgtaccaccatgtcaagctaatttttaaactttttgtagagatggggtctcactttgttgcccaggctggtcttgaactcctgggctcaagtgatcctcctacctcagcctctcaaagtggtgggattacaggagtgagccaccatacctggcctaaaatttcagttatttttgagaaaactgaagtttacagcatgcagtcgtacggaattgcccaaggcaaagatttgaactgagaaacatatataagtgggaaccaatcttttagctggaaaatgggtccaactggccactgttccatctcaattaggagacttgaaaacatagaatatggaaaagtataggtccctggtgtctttgagaattctctggacttaaggagccacagtttctccatgacacctactcacacagagtctctgtgcacacaaatgagctgctatagtacaaatgagctatgcaaatgtgcagtgctaggctctgggactggctgaccaggttggctgcagcttcagggatgcttggcgtccccaagcaggaaggcactcgctatttggaggtggtacaattccttactcaagacagttttttgccttgagcattgcctgctgttagaactgccacaccactccccacctccccagtcatgccaaggattaagaatttatttccttgtgacgctcctcagtctgaggctgctgatcccaagctgtccaccgcagagagcagtgcgtggctaaaaccagggccaggaatttatattcaccctttcacacttcttggctttccacagaagagagtctccttttcatgtcctcttaaaatccatttcagcatagggaagggaggcagataacattttgtgggctggggctgaggcatgaaacccctatgggaggcattcactctcatatccatgatctcatgacagcctcacaaccactggggacgtggggaaagatacacctgtctttcacagggatgagggagtcagaagagtccttggactcaaacatcttgactgaacacgccaggtcataatctcttatcaactctaaactccaccccccatccttaggttaaatgtctactgacagttcagaaccttaaacttagcccaagtggtaattgctacctgtgtatattaatgaacacaacatgtaccaggtgtagctcatacttcaagaggggtaaaagatgaccatctgaattcctgctcattaaataacagctcaatggctaatatataaaagtaagtaaaaaaaaaaaataaataaaagatagctattaataacaactttttaaaaactttttttaaattttaattttttatagagacgagtcttgctatgttgcccaggctggtcttgaactcctggcctcaagtgatcctcccacatccttcccagtccccaaagtattgagatgacaggcatgagccaccatgcctggccagatataaattataataacaacaatacctccactttttaagcatttcctgtgggtggggcactgagctgcacaatctgtaatctttactgtgccttatctttaccaccatcatggagaataggtgctactgaccccagtttacagatgatgaagtaaagtgtcacaggttttgttcggtttgtgcaaggaggatgggatccacgaccagctctgtcatctctcaacctacctaggaggaaagagtaacgaggtgccagcaaaggtgaaaataagagacatttaatacatcgtgcccatgacattaatctcaggaagctttctgaaagaggagaggttttgcagcaccagctttttcttttttcccccctttgagcagagtcttcttgctctgttgctcaggctggagtgcagtggcatgatctcagctcactaaaacctctgcctcctgggttcaagtgattcttgtgcctcagactcccaagtaggtgggactacaggtgtgtgccaccatgctcagttaatttttgtatttttagtagagatggggtttcatcatgttggtcaggctggtcttgaactcctggcctcaagtgatacacctgcctcggcctcccaaagtgttgggattataggcgtgagccatcgtgcctggccagcaccagcttttatacacagcaatacccacttccaaaactcttctcagagaaatgcaattccaagacacatgggcctaaattctctggttcaaaacaaaacgtttttgaaaatgctaaataaagggctacctgagtacagtggcagggagggggtgcagggggaaaagaggggattaacaataaaagagccagcagcaacagtgaactcagatggataaatgggtccagaagagtcacacacaggcccaatggtgatggggaagcctgaggtcattatcttaccattaactacctttcgccaggctctaagccaatgggactggttaagtggaatggagccaggaagtatggacagcagcccgagaagaccaggataggggtgggcagcgcagtgtgtctgttctaagggtgtcagctccccacctaggacaatctgagtcccaggaggctggctgtggagggagcacttcttccctacatgcccctctttccttctttttcttaacttccactcctgctgcctagaggaaggcttccctgatccctggagtttgggaaccctgtgctaactctctattgctcactctgtattaagttgcccatttttctcatttccttcccctggattccgggacacaggaccttggtcctactttctgttgacccaacaactaccttaagggccggcctactgtaactactcaaaaaaagagttgttaaatgaatgtaaggtgctcagtgtccaccaatttgcattaaagtgtacaggggctatggaagcaagaagataacaaagataagatgcaagcccttcattacaacaatgtccactttaacaaacacatgcccaactcttgatttatgctgggttcttccaagaatgagttcattcctatgcttacaccaagcccaatttacttggggaatgaaaaatcgtgttatttatttagtcttccttttgtacattttaaaatcccttctctgtttttatttctacaggtctggcagcttgttaaaaatgtcattttctccctgcacgctgatgagggtagaaaatttgtgtttcaccagccctgacaaatagcattatttgtaaatcaagttaaatgcatgcacagtgcggttcaaactgaaccttctcctggccttcctccatgtctgaactgaagaataaaaagctgtagaacctcctcatggcttctgcaatgacaaaccctgcaccagtccaaaaagcaatgactccctccctctgcacagaaaactgagctcgaaccaatgtctgaccacttcccttcttgatccaagatatcctttccagcaaggccagcctggatcaggcctcggattaggaggatgtttggcattcctactgttctcacccccagggcaggcactgtgcagagtctgtcccgtgacctgcattcttgtcagtgtttaatccttttgtctggcccctgcacttaagtggttataaaatatcttgagaatccaatgacagtttgtggaatgtcagctgatgccaccaacctcaccttcccattttctctcccactgttgcatcactagcctctgccttgtgactttgacagtcagggctgccacctcactcctgagcctttggtaccgaatacacaaacaagacctcagaactctgtgtaggctgatatagcacattcacaaaaaattctagaacacccaacttactatgaacgctgcatgaagctagttgtctatggaaagtttaatctttcccgtctgggtatgtgaatgcataaatgtagagatacatgggtgtatccatgggacataacatttgggttatggttgaagatttgatgccacatattattgatttacaggaatatctttgcatgaaggttgagtccttagggattagagaggcccacaagtctagattctgccatttccttaggcagaagtacaacagtaccctggggaagatggtctgtggagctgaatcacctctccctcctcctcctccagctggccatgcttcccacagttcctttgagaagcagacagagccagctagctccctggcactctcattctggaaagaggctgtgggacagaaagaaaatttaagcactggattgaggagaggtggaccagatggcccaaaggatgccttcatgccctgatatttactcactggacaaaggagtattgagcaggccctacatgtcaggtagcactctgagcactgggacgccatgaagcaagagtactccaggagctgcccattcatggattttgcaattcagtgacagccagagtctcctcacacccttcttcctatacctccttaatcccattcctccttcagctcaagcgtgcatgaacagagcaacagaaaccatactctggttcttactagttttaaacagaatgagttcaatcgtatcttcctgcagtccatagtctatagagcagccaaagacaactttcaaatgtcacccccccagtctgaacaccctccagtggctcctcctggcacttagaataataatcatgccctacaccttggccgactgggtcccatgagaactggcctctgcccacatctctgactgccccatcctcagtcaccatctacagctacaaagtccggctctcaatttcttgacagagaatgctaacttctatctcttgcacttgcacttgctgtgccctctgcctggaattcttctccaggatgtctctcaagctgcctataagcattcaaatagccccttctcagagaggccagcacagaccaacctgtgctcctggcactctctttctgttgccctgtttcatctccatcctggcatttaccaaggtcagaattcacacatgtatttgttttactggcttaccttctttctccccaaatgtaatgtatactgcatgagagaagggagtgttcctgttcttattcaccactgtgaccccagaccctgtactatgcctggcccacagtaatcttttaggaaatatttgttgaacctatgtcagattattcaacactcaccccattcctcatgggtttataaagcctaggtcataaagtgtctgaactgctggcaatgtttgcagggataattcatatgacaagtttctaaaaggatatagagaagttttctttcatctttgttttatacgacgctagctttctctctctagttaatggtatgattcgtcaagttctccaaatgccatctgctatgaaagcaagagcccaataaaaatgtctgcagaagaaatttcttaaagaacatctttagagatgtttatgtaaagtgatacaatgaaaccctgcacaaattaataactaaagcatttatgaatattagaaaggatgaggccaaaaattttcttggaacagtttttgtacatatgaggtaaaatgcagaagatgtcaaaggcctggcattgttatgtttcttttgccttttctttgcgtcccaaattattatggcatatacccaaaatccatctactgcttcagaagtatagatcattttccaaaagaagcatctggaatagctaatttgttaccaaagccggtgattaaacacacatgatactgtggggctgaatggctggccatgagtcccagttttccattgtattgggtttcagctattaaccaatcagtctgtttttagagtatgaatttgtaatgtagatggctcagaactcttggctacggggcccttaatgggacagcatttctgtcacatggaattcttgttgcttggtttccattaaggtatcttggcttttaaataaactgtcaagtaaaacttggcatcaaaacacaaagtgagtaacttcctttgttgagtcgttgacagctccgctgtgtgtcagatagatagctgctaagagtcagctctaaaggcgattgcagtctctttggaaggatgctggtatcacaaactgccttcctcaggattaaggctaagcaaaatttagggataatctttatggaaagttaacccagcaacggccagtcgaccatatccctctccacaagtgttggttttggaattataaaagttttggaggtgtgaaaacataattggaaaactttttttccctgcttaaagggctaattgatttcacaggtgtttaattatcatttgctgtgagataataccttgtagtgccataaaaaatggatttaattttctagtgcttgcaaaaccatttccaaagccaagtcagagctaaagctagataactattctataaatcaaacacactgcctcctttctttgaaatttttaatacttggggataatgatatctgacaaccttgaaactaacatgaaaaggatttttctgccaagtgccaaaagtcaaccattggagcatttcaggcagtttggttcattaacagtgactcaggcagcctcaggaccctgcctgcaggcttccaaaacaccccaagggtagaccattggtgtgtgtcaggacacaatattatctaccaagaccaaatggtcatatatccaataaggtctacagaaaaacagaaataaaacccaaaccacccttagcacaaaaaactgcctggaaacaactgtaactctctaagctcaaactaagagtcctggaacttagaaagtggagatgtttcaacttgatcaagggatactttcctatcttatgcttaaggcacaacacttgtgctttctgtaataacaagggagggaatcataaaatcaaacaaatgttaacagctggaaggcaccacaaagatcatccagtccaaatatccagatgaaaaaaagcagccaggagaggtcaagtaacttacccaagatatcaccaggggcagaaccaagataaaaagaataattctgagtgagcagagaaaggaaaagaaagcttgaaaatagatttagagtcccattctcacccaaaatctaaaaatacaaggaagaatttttaaaaagacaaaaaaaaaaaaagtgaggtttcattctgtaagaggagtggctatttcttcaacggagcccagtttccacagaagtgcttaagctgccttaaataactacatgggggttttagttggtgccacgtttcggatttttttttttctctccaacttctattcagaagctgctgaaatcctaccatgttccattagattaagtgtgcttaaatgatctaagaaagcagtgcaatttagctggacacacacacacacacacacacacacacacacaccattatttaatttatttaatgcatttgtatggagggtgcacataccctaaaccactaaatgacaaagatttttcaggcagttcaggttggccttcacagtgctggataaaataatatacagcaatatgcagtataattggtgccattcttggacactgtgtttgggccctggtagtaaaagcctgggccaaagtcatgtgggctgaaagggcaggggacaacatgggccccagtatagtctgaaaagggttggaatggaagggcatccatagggactggcttgggattgcaatgaaactccttcaatgaataaaaatggtggtaataactctagctaacatttattgagaacttattacatgcccaactctctgcaaagcactttatgtccatttggccatttgctcttccaaaaatcctatgaagtaagtagcattatatctcccattttgtagaagaggaaattgaggattacacctaatttgtctaaattcacttaataagcaggtgggtataatttgaactgaggcattgtgacttcaggacccaagttattgtacacaattgcacgttgcctcctttccataatgctttttggagatgtcccattggctagctaagtgagctctgtcatgagggacaccatgagaaccactatgaaatgcaagggactaatttatgtcttctaaccaaagatgtgcctgacatggggagagagcttttatgtggctctgaataagagataacatctttcccagggtcagccccatctcacacactacttccaggttttggggacttgatagaacaggtgagaaataaatgcctgttcatttgctatatttatctcagccaggaccaccaatggaacatagaaacttcaaggcctcttcctaagactttatatgactcttagtttcccaatccatcatgaggctttggtgccaagacccacaacatgaattttagttccctaataagcttgtggagtctctactatgtgtgcaggtctttaagcccatatggacaaaattgggaagagacataaaacaaatactgcaggagacaatgagattccattcattcatccatccatccatttaccaatagcacttattacgtacccactaagcaccaggcattctattgtcaggatacaatggtgggcaaaataaaaaatcctgttcctttaccattcagaattatggaattcactgtcttgcgtagggagactgatagtaaataattaatcatataataaaatcaacagctatagtagttccaaggagagactcatggttctgtgagagcacacatggtagaggaacttgacctagtcagggggtggggacgaagctgaaacctaagcgctaagtgtccagcaggactggggttcagaatgcagtgctttgagcagtgctgacagtagatgcaaaagtcatcaagaaatttaaagtacttttgggaaaacgaagtatgtgtaccataattagtcatctcaaaaagtcaaaaatattttgctgtgatgtagactaaatccatcggatggtttgcaaaacaaaggttaggactccatgctgcctggaaaaatgattaaagactggatgtctgaggccgggcatggtgtctcacgcctgtgatcccagcacttggggaggctgaggagggcagatcatttgaggtcaggagttcaagactggcctggccaacatggtgaaaccccctctctactaaaaatataaaaattagccaggtatggtggtgtgcacctgtaattccagctactcggaaggctgaggcaggagaatcacgtgtctggatggataaacactttcattcagttaaacatgttgatcatatcagagcattccagattccacatacctgctaagcaataactaaggcaacggacattgacccacgttacagatagtaaagctgcatcagaaaagagccttaacaacttgattagagttaatgaaagatacttcaagttgttctagttcatcttatctgctcttccctggaaacctggcaactcacatttttagcacttatttataagcccctttcctattgccgcaaaattctacaggctctgtagaaatggggctgagtctctaaataatcacattttgatggtaattaaaagccaaattccctaactccctaaatgctatgagcagtttgaatgcctgtgttttgtcctaacattgagcatctctacgaagaaggaaaaccatgttagaaaatactgaaatgacttaattgcagaaagaggcagccttatgatgaagtagcagtgagcttctgctgggatggtacactcaggggaggaagctgctcacaggaagaacgcccaggagcgctggcctcagcccttcttcaagtactcactgctatgaggcctgggccgaggtcctacaggccaggagaagccctaagatgacatctttctgctatggtgacaagtccttcccattgactctaatagttgttaaggtaagagaggtaaagaagggaatttcagttattaaggcattagtttggattggagctgggaacaaaggaaaagccacaactgggcttcatccagcaaagacactattttcatccatctgcctcctagactaatttagggattacaggacctacccagggacctccgatgcagcaaagtaaggatcatattgtgaaggtagaccaggccaaaccattgccacctctaactttaaggctgctaatctcttagaaaaaaactggaagaaaaagttggagagggcagtagggggagaaaacacacacacacacatacacacacacaccatatatatatttaaagaccaccaaatacatttttcatctttaaatcaaagtcctgcatagaaaaagaaagctgctggtaagtgttaaaggaaaggcttgttgccaataatataaaacatgtttataaaataataccttagcatgtagaaataacaatgataatgatgatataacagccacactgttgagagcacactcattcgctgaacactatgctaattacatacagtattgcgtcctaagtgtcacaatctgtaacactaatactatggtcccatttcacagctgcacaccaaggctgacagagatgtgataatttgcccagagttatatagccagagaagcataactagaacctgaacatagccctctgaatctgaagtagatgctgctgaacttcacttgcattttttttaccagcagttttgatgccatatggagaaataggtataaatgaaatctttcaaagcaatgagcactgaaaagattttggtgcccattgcaatgagtaattcaaataatgaactactaaaccttaaaatgcagaacttatatgtatgctatgctgacattaaaatggcttgtttataggttttctgattgctgcattctggataagataaagcagtcatatcctctctccccactgctttgataggatgctaagcacatgtaaagttgtcggaaatcatctcaaacctaaaacaccaaactaagtggcaggtctgctcagctagttgtaaatatgggcctagcttcactttattgcactttgcagatcttgagtttttgtttttgtttttaacaaattgaaggtctatggcaaccctaagcaagtctatcggcaccatttttccaacaacgtgctcaattcctgtctctatcacattttggtaattctcataatatttcaaaacttttattgttattgtatgttagggtgatttgtgatcaatgctctttgatatgttactactgtaattgttttgggatgtcacaaaactcacccatattaagatggtgaacttgaaaaatgtgtgtgttctgactatgctaccaaccagccatttcccctccctctctctttgggcctccttgttccctgagacacaaaaatattgaaattaggccaattaataaccctacaatggcctacaagtgtgcaagtgaaaggaagagtcacacgtctctcactttatttatttatttagagacggagtctcacactgtcaccctggctggagggcaatggtgcgatctcggctcactgcaacctccgcctcccaggttcaagcgattctcctgcctcagcctcctgagtagttgggattacaggtgctcaccaccatgcctggctaattttttgtatttttagtagagacagggtttcactatgttggccaggctggtctcaaacacccgacctcaggtgatccacccgcctcggcctcccaaagtgctgggattacaggcgtaagccaccatgcccggccgcatctctctttaaatccaaggctagagatgattaagcttagtgaagaaggaatgttgaaaggcatgacaggttgaaagctatgcctctcatgccaaacagccaagtcatgaatgcaaaggaaaagttcttgaaggaagttaaaagtgttactccagtgaacacatgaatgataagagggagaaacagctttattgctgatttggaaaagttttagtggtctgcctagaagagcaaaccatccacaacattccccttaagccaaagcagagtaaggctttttctttttttttttttttgtggggggacggagtctcgctctgttgcccaggctggagtgcagtggcgtgatctctgctcactgcaagttccgcctcccgggttcatgccattctcctgcctcagcctcccgagtagctgggactacaggcgccagccaccacgcctggctaaatttttttttttttttttttttttttagtagagacgggttttcatcgtgttagccaggatggtctcgatctcctgacctcatgatccgcccacctcggccgcccaaagtgttgggattacaggcgtgagccaccgcgcctggccaaggctttttcaattttatgatgacagagagaaatgtggaagctacagaagaaaagtttgaacctagcagaggttggctcatgaggctttaaaaaagaagccatttccatatcataatagcgcaaggtgaagcagcaagtactgatctagaagctgcagcaagttatccataagatcattgatgaggtggctttacaaaacaacagacatgcaacgtaaatgaaatagccttagattggaagaagatgccttctatgactttcatagctagggaacagaaatcaatgactggtgtaaaggtttggaaggacaggctgactctcttttaagaggctaatgcagctggtgacttgaagttgaagccaatgctcatttaccactccaaaaatcctaggacccttaagaattaacttaaaagctgtatatttagctttaaagctaaatctactctgcctgtgctctataaatagatggaacaataaagcctagatgacagcacatctgtttacagcatggttaactgaatattttaagcctaccgttgagacctacggcttagaaagaaaaatttcttttaaaatattgcgttcgttggcaagtcacctagttacccaagagctctaatggagatgtgtaagattaatgttgttttcatgcatgctaacacaacacccactctgcagcccatagatcaagaagtaattttggggccaggcacagtggctcatgcctgtaatcctggcaatttgagaggccaaagtgggaggaatgcttgaggccaggagttcaagaccaacctgggcaacatagcaagacctcatctctataatcaaaaaattcagccagactaggcatggtggctcacacctataatcctatatcatcctagcactttgaaaggccatggcaggaggattgcttgagcctaggagttcgagaccagcttgggcaacacggcaagacttccccccgccaaaaaaaaaaaaaagtcccagatggcagcatgcccctgtagtcccagatattcaggaagctgaggcaggagggtcacttgagaccaggagtttgtggttacagtgagctatgacagcaccactgcactccagcttgccagcttgagcaacagaacaaaactgactcaaaaaaacaaagtaattttaactttcaagtattgttattttaaaaatacattttataaggctatagctgacagagatggtgattcctctgatggatctgggcaaagtcaattgaaaatcttttagaaaggattcaccattctagatgccataaagaacattcataattcatgggagaaggtcaaaatatcaacattaacaggagtttggaagaagctgattccaaccttcatagatgactttgtggagttcaagacttcagaagaagtcactgcagatatggtagaactagcaagagatctataattagaagtgcagcctgaagatgtgactgaattgcagcaatcttataaaacttgaatggatgaggaattgcttcttatggatgagcaaataaagtggtttcttgagatggaatctactcctgatgaagatgctttgaacattgttggaatgataacaaaggacttagaatattacataaacttagttgacaaagcagtggcaggggttgagaggattgactccaactttgaaagaagatctactgtaggtaaaatgctatcaaacagcattctctatggagaaaacgattctttcatgaagactacagagaagtctctcatgaaaggaagagtcaatcgttgcggcaaactccactgttgtgttattttaagaaactgtcagccaggcacagtggctcacgcctgtaatcccagcactttgggaggctgaggcaggcagatcatttgaggtcaggagttcaagatcagcctggccagcatggtgaaaccccatctctactaaaaatacaaaaaagaaaattatctgggcatggtggcctatgcctgtagttccagctaccttggaggctgaggcaggagaatggcttgaacctgggaggcggaagttgcagtgagctgagattgtgccattgcgctccagcctgggtgacagggcaggactccatctcaaaaaaaaaaagaagaaagaaagaaagaaaagaaagaaggaaggaaggaaggaaggaaggaaggaaggaaggaaggaaggaaggaaggaaggcaggcaggcaggcaggcaggcaaggcaaggcaaggcaaggcaggaaggaaggaaggaaggaaggaaggaaggaaggaaagaaagaaagaaagaaagaaagaaagaaagaaagaaagaaagaaagaaagaaagaaagaaagaaattgccacagctaccctcactttcagcaaccaccacttgatcagccagcagccatcaacaaggcaagacccttcaccagcaaaatgattatggctcaccaaaggctcagatgatcacaagtacttttttagcagtaaagtatttttaaattaaggtatatatattgaggtttttttagacatgttattgcatacctaatagactacaatatagtgtaaatataacttttatatgtactggaaaaccagaaaaaatcatgtgatttgctttattgtgctctttgttttattttcgtggtctggaaccaaacacacaatatctctgacgtgtgtcttagaacttagtgttcaaaaacagaggcacaaaacccagccactagttcaaaaccttccccttgggaggctaagtggagactgtagaataaaaatgaggaagaataagtcagcaactacacaatatatatgtatttttaaaagaagaaaacaataattgagagatggtttcatgatcttctcactactcctgatttggaaatctggaaagtgtggtatgggtatgagggggattcttctagatggatatgttaggtgaatccttgtagggtagtgcaagttaaaggtataacacacccaactgaatgtacattcatggtgtatacacatatattgcttctgggtttttctatcaaaagcaagagccaaaagaaaaatactcaacaatgaaatgtgtccagtaaccttattcttctgagatattactgtctattttgttactttggaagctttttggttttactgaacatatattttgattatatgcatatgcatagtatttaacatcttttcaacatgaaaagtgtccatcaatggatgattggattaaataaatggtggtatgtatgtatataccatgggatactaactcagccatgcacacacatagaatgaaaatgaggctgggcacagtggctcacgcctgtaatcccagcactttgggaggccgaggtgggcagatcacctgaggtcaggagttcgggaacagcctggcccacatggtgcaaccctgactctactaaaaatacaaaaattagccggatatggtggtgggcacctgtaatcccagctacccgggaggctgaggcaggagaattgcttggacctgggaggcggaggttgcagtgagctgagatcacgctactgccctccagcctgggtaacagagcaagattctatctcaaaaaaaaaaaaaaaaaaaaaaaatgaaagaaaatgaaatcatgccttttgtagcaacatgggtggaactggaggccattattctaagtgaaatgactcagaaagagaaagccaaaaactgcatgttctcactcagaagtgggagctcaacaatgggtacacatggacatacagagtgaaagaacacatactggagactcctcaaggtgggagggtggaagggggatgagagaagaagaaatctacctattgggtacaatgtccactattcagatgatgggcaaactgaaagcccagccttcgccactatgcagtatgtccatgtcagacaactgcacttgtgccccctaaatctatttcaaataattggtgattcagtatgtcctttgtaaaggaaagagtatctattacatagataatctttgccagggactatctgcggttgcaaattggagaatcacaagcagtatccttctggcagatatatttggtttagtccctgttgaatctaaacatttttcttaaattaattgccaacattttcaaatcatgagatttcatgccaaaatccggatttcaggcatctcatgaaaaatgggaagatttggcagcactggacctgctgtactccctcacggcaaattagcagaagctgagctggcttgattcatttattacatcacttacctggcccctgtaggcatctgagttagtaacccctggtctacaggtaaaggggctaaaggtcagatacaactcatctcagatgctggaagcagctttcttagtcgaaataagcagctgtcattagtccaaatagggacgaacgatttgactttaatatgaaatgttttatgtgggctataaaattatccaaactcgacacaggacattttgagcttatttccaaatcatctggccttcatctacccactggaactattactctgctgggtcctcatggaaacatatctttcagccctaacaatgagactacagacatctacgtccccaacacaacagctaaaaagcagtagaatgtcagaaaggctatccacttagcccttggctgacaggccccactgagcatcctttgcgaagtccatttactagctaattcataatttacacaaggcattcagacatagcagctaagatataaaacatttatcaacacagggactagtttgttattttaaaataattatgtttaagtaagccaataaagtctatcttctccaatttacttattgagctttatgaggcaatttaagtcccgattttggggggtatgtatgaaaggagagcatggaaatgccatttgctccctgaagtttttatcttttttttttttttttttttttttgagatagagtcttgctctgtcacccaggctggagggcagtggcatgatcttggctcactgcaacctctgcctcccaggttcaagtttttcttgcacctcagcctcctgagtagctgggattacagatacgtgccaccacacccagctaatttttgtattttttagtagagatggggttttaccatgctggccaggctggccttgaactcctgaccttaagtgatccacccacctcagcctcccagagtgctgagattagagatgtgagccactgcacccggccttgaagtttttgtcttaaaaacccagatcctcaagagaagaccaaaaaatggttgtggtgctcatatctctgagacatcttgcagagaggtaatccctaaatgatgcaaatctggtgaacataatgcacacaggggacaaaccaaacggtgaaaactgatgttaaactataaattttaagccacggacattagtgtgaaactttacagcttcaaactttcaaaacccacacaaaagaatttgtacgacactgatgaaaatttagacactagagatgctcaatcatgcgctctgtaagcaaatcacacttcatggttaattttgttgccagcaggataataaagtgtgatacaaactctagcacagtctcagctgctgttaaagagtctgaatggacagggcattacaatcattaagaatgcagccacgcaattcaaccagtagatggggcacatccacatggcaagcgtcctcactgaaccagccaggtgggaaagaataggccctgcttcctgctctatagccccctaccaaagagttacagagatagccaaatgcagaaggtgaggctgcacctcatctctaaaagaagtatttgattatttccttaacttctctttcattcctatgacaatgtaaataaaacgggtggagactggtgggattaggaggaatcagggttgaccacctcagaagggagaaatatattgaatccactctataaaagcacctccttcagtagtcagtgagtcgcttattcttactggggaccagtgtttactgagtgctcattccatccaggcactgctggaattggatgttagatctacaaaggggaattagacaggaatgggatgtggtccgtggagactgtggcttactgacactgaagtcctgcaaatgccagtcacctgtggctacaaatcatgacagggaactaaacaggtgggcgtgagaatgcttatgggtggacagtggcatctcagtaaagatggggtgctcagaaatgccctctctgaagaagtgacattgaaactgagggctgaggacagaggagaagccagctccctaaagggagctgtgggaagaataattcgggaagtggaaagcatgtatgcagagccccaggttgcaacattctggacacactcaaggaacaatggaaactaagccagtctgggtgggagtggtggaggtgttggcagaggaaggaagggaagtgatatggtcaaaggtatttgactaacagggcagtgggcgttgttagctttgatgcatactcatgtactccacagaaaacacaaacacaaaattatatggtgcttaattttccagatgctattttaaactttttacttatataaccttcacttatttctcacaataactctaaaaggcaagtactattagtatcatcctctttttacagagcagaaaacaagtacagagaggtgaagtgacttgcccccagacacacagctactatgcactagaacccagactggaacggtagtggtctgattccaaagtgcatgctcttcacttctatattctcagaagcactgttttatttcaaggtgactctgtatattttgatatcactatgctaagtctaggtttttttttttttttggcatgtttgttgtttgtttgttgttgtgacacttttgtattgctttgctggcagacggctgatgcgggccaaataagaaatccacaatctggcacagagtacacgcctagacagatttatcatatgtcctgataatcaagcacaattgtgtaccccaacctttgccagatgccggcttcctcatgaatctgggttctgtacatggactccccaaaggacagtaaatcagcgcactagatatctctgcaaagtttccagcagatgcttgtcctgtgcttaccctgcccggctccagatggctccacatcctgctccttcctctcgcgggcacttcagatatgtcagcaacgcagggtgaggaagaaggtggaaggagcagaactaacgtagttctttaagaagccccgcagagcccagaggtattttatatatgcatatgaggagctctaagcccggtcagcataaatcactgccagcttttactacctggacccgattttcaaaaggatgaagttgtttacatgttgcagaaaaggtttctgctaccagttaacctgtcacctgctacaattcattccaatctcttccataggcaacaggttgtatggaattttcctgcactgacatattagcaagacaattctatacctactccgtcctctcaaaagggagagaacaacgctgagaaataggtcccagcaaaaagatgttaagaaaaaattcttaaagcgtatattgcaaatcaacaacaaaaacacaaaaatcagaaaaatttttaaaaagacttcattctttcccagactaaggaacaggtttacacacttttctttctccctaaattaaaagtatccttgaccttatccagtgatttacacacacagcactgtcactaagttttgcttgccttttttgggaacagtctagaccagggtgtccaatcttttggctttcctgggccaggatggaagaagaattgtcttgggccacacataaaatacactaacactaatgatagctgatgagctttaaaaaaaaatcgcgatcaggagcagtggctcacgcctgtaatcccagcactttgggaggccgaggcgggcggatcacgaggtcaggagatcgagaccatcctggctaacacggtgaaaccccgtctctactaaaaatacaaaaaattagcggggcatggtggggtgtgcctgcagtcccagctacttgggaggctgaggcaggagaatggcgtgaacccaggaggcggagcttgcggtgagcgcagatagcgccactgcactccagcctgggcgacagagcgagactctgcctcaaaaaaaaaaaaaaaatcgcaaaaaaaaaaaaaaatctcataatgcttcaggaaagttatgaatttgtgttgggccacattcaaagttgttctggtctgcatgtggcacaagggctgtgggatggacaagcttggtctagataatccctacttccttcctcttctccaaagatacacagatttttcaaaaaagtagaagctgtttttttttaaaaaaatagagttcataacactagtattcatttatttgcatcagaaattaattaccatgacagaaacccaaatgaacatctcagagccaggtgtgtttgagatgagctgactgactccatacaaacacttgttgattttgcttgaatcctctgtaaatttcacttcccacttattagattttcacagaggccagaagacccaaataaaatcttctttacttttttgagacagggtcttgctttgtcgctcaggctggtgtacagtggtgcaattatggctcactgcagccttgacctcccggtctcaagcaatcctggcacctcagcctcctgagtagctgggactacaggtctgcaccaccaaatctgcctaattttttaaaggttttttgaagagatgaggtatcactatgttgcccaggctggtctcccttacttttaaccagtggtaaagaggagcctatgaggtcatcttccattcagtggtatctagactttgtgattatagagcgagaaaaacatccagtggacttacttagaaatgacttccttttgtcttatacttactgagagatttatttccttcatccttcttgtaacctggggggcctggagaatttcacactcattgttccctatcttcctcattctacagacaaatgtagttatagataagattatttatttctgactgtcaagactcatagcaaaacttgcttgtattacaatattcatcctgtctggagatgatggcactaatcgtataaatcgtgtaaataaccaggtgtcttcacagactgaaagtctagaaatgcatctaggttgacaaatatttacaccgagttatattgctttaatttaccatcagttgaagggagaagggggtgagcaatatcacattaataaaggaagagggtattagagcttatcatttcatggaggcttgtctttcttgtgtatattctcaacatacaagaagttaagccaggagcagtggctcacacctgtaatctcagtactttgggaggtcaaggtgagtagatcacttcaggtcaggagtttgagaccagcctggccaacatggtgaaaccccatctctactaaaactacaaaaattagctgggcatggtggcacgtgcctgtaatcccagctactcaggaagctgaggcaggagaatcgcttgaacccgggaggcagaggttgcagtgagctgagattgcggcactgcactccagcctgggcgacacagtgagactcagtctcaaacaaagaagttaaactattaaaatctgaaaaatactaaaaatatttttaattcaaaatataattttcaattaagcagagacttcacctcagagataactgataaaaactgaggcacagagaagttaagtggctgaccaaggtgacacagctggtgaaggacacagccaggactctaaccagctccacatcacaaacgtgctgtaatgagctactggctgcccagccagccgactgaacaggttgtttataaaatggagcaaatactatcaatcccacttgcccttagaaatgcccagagaattaaccaagctcaaggacagtggggatggcacagaactgactgtacaggtgtaaagtgtgatgatttatgcaggaactagctatcaaagttacggaaacctagaattttatccattgttgggtatctcccagtagtgcatgattagccattcttgacgatgattctgtgagctgttagaagtttttgtgtgtctaagtagatctgtctgaaactattttcaggttgtatgaatctttgtctaggaatttgcttccctggcctacccaaaaaaaaaaaaaaaaaaaaaatgaagtgcattttgttctgttcacagatagctttctttcttgctactcttggccataagaccaactctaaaaacattggtgaccctgaaaatgtctcaaggacattcagtttactttccttgcctctaagccactccttcttttaaaaaagaaagcttgaggaggctgggtacagtggctcacgcctgtaatcccagcactttgggaggccaaggtgggtggatcgcgaggtcaggagttcaagaccagcctggccaaagtagtgaaacctcgtctctactaaaaatacaaaaattcgctggacatgatggtgcgtgcctgtagttctagctacttgggaggctgaggcagaagaactgcttgaacccaggaggcagaaggtgcagtgggccgagattgcaccactgtactccagcctgggcgacagagtgagactccacctcagaaaaaaaaaaaaagcttgaggaaatttatagcccaggaaaatgagtggggaagagatgctatttaaatgtaaaatcactcctgctagaggtagtggtgggagtggggagagatgaaagaatggggtgggtagaagaaaatgtccgtccatgggcaattccatttttggctattccatggagacaaaccaattagtgtggattttcaaggtggtttgtgtgaactggctacctgcccattatgaattggactgggattaactagctcattccaaacactccaccaaacagcaaatggtcacaggaaaatgatttttagtcaccaacaacctggctggattggaaacttggagatgaaagccttgataacctcctaccaatctacaaagagactgtgactccttcagatctacccacttctaaatacctttttctccctgccctcttcattctttgcttttattccttaaaaagctcttttgcagttcggaggctgtttgtttttctgaacataaacatacctatcaaccaaccagcctggtaatggtcaatgtgtatgaacaccaccatttatgtgtttcatcatatgagcttgcatgactgcctcatctataagtttaattcaacccccggttctagaaaccagtttacttctaatagagaagccctgagaaacttgggctcaatattgagggcttcagcacacgactaatgccataagcacttttaattatctgtctcagcttcttacagctggaatttcccttgttccagacacaaagtccttaactttatattccaggctcaggaacttggctccagggatcaccaccagccaccagcatgttcattcattcttttctccaagcaaatgatccctacaccagggttaacaacctcatcaagagaggctaaggcgatttcagctgcaaccctctgtatgtggcatccctgtggcttcccaccttagataattgctatcctcctttccctcacctattcccttatggggagccactcagtccctttggcttaggtgggactgatcaccactcctagggtgcagcatgtgatctaagtataagccacaagcacatcatcatatttcccaggccacagtttttcagggatggtgttgggaatcattgaagccaatatggctggtcagcttctttaattttaatttaaaaatgttttgtttgtttgtttttgagacagggtctcattctgtcacccaagccagagtggagtggcacaatcatagcttaccacagcctcaacctaccaggctcaagaaatcctcccacctcagcctcctgagtagctgggacctcagtacatgccaccatgcctggctacttttttattttttgtagagacgaggtcccactatgttgcccaggatggtcttgaggtcctgggctcaagcaatcctctcacctcggcctcccaaagtgctgggattagaggcatgagacaagtcagtgccggtagtatctgcagtagaggtaggtagaggctatatatattcttccacacatcctcacgaccaaggggtatgttactatgaaaatatgtcacggaacaaatgttgaagtcctgccaaaattccagcccatagagcagggcctgatacccactgccaggccacattaatgctgatgtggagtagccagccctcaacaggctgcctcctggacttcctccactaacctggcctggggcccccaggacctccccggagccaagtgcctgccaaaaatctcactttttgcacaactctatgttccctgctgtgtgtgttctgcctggcgggctggacttcccgccagcgcccacaggcccccacccagtgtctgccccactttggcggatgaggcttctctccagacccatgtcctccagtttgctctgtgaaccccagtgagcctgcccaagcctgcctccatatccaccatgaggaagaatttaatgaaagaaaaccaatgtgccaatctctaatactggaacagaagttccaataggtggtgaagctcaatcttgcccataaatagtgatttatttgtttggcgcagaggattggaaggacaaactgtaagctcagcttcaactcagagctggctaaggggctggcagacaggtcaactctctgagtccaggatgcacaggaatgttctggtctcaagtgcatgatgaagtcaattaccagaagttttttaaatcctccaaagtatctacctccttgtcctaaactatgactggaaattcaaataaaacacacttagtaaatttccttctttttctggcaatactggcttttattgaaggatgatgtagcaggaacaaagttcattctcaatataacttatcactttatactatctacatcttaatgtcaaacgcaataatctctagcatataaatgctattcctgattttaaaataatcctatttcattaagctacattttaatggattctacttgaaaaggaagggtggagttcaaattccttagccataaacattcattttccctcatatttatatttacatacacacacacactcacacatatatatctccttgaaataaggtaatgttaggtgagtagtacttttaataaatgtagttccaaaaaatcaaatcaaatagtcctttggatcatgaattactttgtaagattcagaaaaatactcatttttctatgagagacaaaggaagaaaacaatgaggtgatgttgctacccctgttgcgagaatcaatgtcccccaaccttgaagcactattgatttcaaatgaaaatgttgtttctgtagttttaagactttgctccttactttaaaaaaaaaattaggaaaatgaaaaaacttcatctaaagatgaccaaactattcaattatttccgtgatggctcatttctcttaacacataaacaaaactaaaactgaaggaattagatgtgataatgacatatctctcaaatctcatggtaaaattggatgctcagtggcattaaaacacatctcccaccaataactttcctctgtgattgccaaggtgtaggtctctcttattcaaacatctgagaattgttatgtctgagcatctgctcacattcaacatttgatgctagtctgttatttgctagggactttcctaggcacaggggatacaaaggtgatcctctgagctaaaaatcagtgtatcaacgggcattaagtagaaggagcaaggaggggtctgatgttgatcttgggtgcaccatttgtttccaaattctagcaagttgtccatcagtctgtactatttaccctagagtgaattgtggacacatggctcattcataatcagtccttagctccatccacatttattttactgtcatgcaacttgctccagagtaggaggcctcttcctactccaagtgttagaaaatacagatgaactttaccattccacaaaggataaagggattgggagcctgttgaaagcagggacagtatcactctacttggtgtcccgtatccacatcaggactcagtgggtataccataaatgctttgtcacacacacacacacacacacacacaaaagattgaaggaataaaaaacatattttttaatgatccaatttaaaacatcaccttagtattataaacagcattcaggggaataccaactgagtttctattctgcagaagggtaaagcaatagagagaaaaaaggttaaaagagcaaatctctagccgatgtaactgggaaaaaaatgtaaaaagggctgatctctaactccaagtcctgagcacaatctttggctgttgtatagaattttcctatgcattgcctgcatcttacagaagtatttaaaagccttccctaatctgcccttgtttagttttagctgtattctcccatggttttctgatataatcaaggaaaaaatcaaccctaatagtgttttcattattttacagtacaattattttgagagcatggaaccttctgagcatgttcctataacttcaagacaaaaatgcagtactgtttctttcaacataaatgcatgtactggaatactctggcaccaacaataggatcaaatgatagaactcttcgttcagaaagcctgtaagaagactttatcctcatccccgtgaggggcttttgcacacatctgtttcagctcagtcccctagagatatctaaaatctaattaaccaattaatttgcaaatatattctaatgtatgcaaggcagattttcttgggtgttaaattatctgacactgaaccatatacagtacacaagagcgggacctcactgaaataccacaagttaccccaatgcaagaacggctaggtgggctctggtccacaagcacttctattccctaatgagaaaatgagttaccatggtcaggttaggttgtgtgtgcttcagtaaggtactgctaaatgcactggtgagacagaggggtcatcaggcactctgaggcttgtcttctaaaactgcttccacagtatcccctagggtagggctggggtgggcacggttgcctggggccaaggaattggagaaaaaataagccagctcagtggctcatggctgtaatcctagcaccgtgggaggctgaggcaagacgatcactggagtccaggagtttgagaccagcctaggcaacatagcgagaccttgtctctgctaaaaataaaaaaaataataattagctgcatggggtggcgtgtacctgtagtcccagctacttgggaggctgaggtggaaggatctcttgggctcagtagctcagtagatagaggctgcagtgagctatatcacaccactacactgcagcctgggcaacagagtgagaccctgtttcaaaagaaagaaaaggaaaaggaagggagggagggagggagggaaagaaaaaataagatgatgatacatatttcacttagtctgttttcctagggtggatgaagggaagtttaagctatgggaagagtatgctctatcatactgggaattactaactgctattaatttgcatgcagaactctgttcttcaagaaagcagccacagcaggtaacattgtttactcagacaatcaagttgtaatttactgaacttgtggattaaaaaaaaaaaggatgttcttaattgctacattgcaacaatttatccagctcaatgactgtatagctacagataagaactcagaataacactatcaaatgttagggggattacctaatttacaaaatgaagagtatctcaatgcacagtgtgttgttacctaaaaatatggaatgtggattttaatatgtttctgataatatgtttggatagctgctaattgtgcagcattaaagcaaagctgattttgttatttatcttttattcaagacaaattattattttgattattcacaaaatggaaaagaaagaaatggcaatattatacaatgtgttttggtatcttatttctataatgtaaatttttctactattcaatcactttcaaagatctccaaacacatattaaagcgaatactgaagcagagaaaaaaaaaaaaaaaagaaagaaatgcatgtccagtttagggttgaggaagccaagatgggatttttacataataaatagattctaaattttcttcaagggttagggagaagttaaagagaaagagtgttagtatttgctatggtctgaatgtgtgtctcccacaaatttcatatgttgaaatcctaacccaaataccgatgggatgatgatgtggagcttttgggaagtgattaggtcatgagggtggaaatcttttttataaaagagactgcagaatgattcttcaccatctcagccacatgagaatacgatgacaagcccgcagtctgtaacctgaaagagggccctcaccagaagctgaccatgttggcaccctggtctcggactctgagtctccacaactgtgaaaaataaatttctattgttcattagcagcccaaatagactgagttcttacagttaaaacgtggattggtcaattcataatagttgcctaaaagggtaatctatatatgcaaacttctttctgacaacgaaactacaatttcccatgaagttgagaggggttaagaaaatggagaaaattagcaagtatggttaagaccaatgttgtcctgtgacttttttttttttttttttttttttttgagacagggtattgctctgtcacccaggctggagtgcagtgatgtgatctcggctcactataacctctgcctcccgggttcaagtgattcttgtgcctcagcctcccgaatagctaggattacaggtgcatgccaccacgcctggctaatttttgtatgtttagtagagacagggttttgccatgttggccagtctggtcttgaaatcctggcctcatgtgatctgcccgccttggactcccaaagtgctgggattacaggcatgagccaccgcgcccagtctcactttaaaggagagagttaaagtgacatctaaagatatgcatcccaataggattggggtgattttcaacattcatataaaaaatgagtttatcaacactcaaaatagatttatttggtatttctagtttgtttgtttaaaatgccaacaaaacataacatactatggctatcttcctccatttgaaaagacaagtaatgtggtaaatatgctacaaagtggcctaggagaatttcttaggtatctcctttgactaacatactttaatccttttcactcttgttagcctcagcattagtgtaggtgcaaagcagctggtgagtaaatttgggtataatgagccagtctagttcattctaacaatgagaaattcctaattttaaatggtcatttcttttttaaatagaaatgaacagagaggtacaaaaaggctttggtagagtatgtcataatgcataattatgaatatatattgtcaagtttgtatgacaatttagatctttaatgttttttccattatatctttttaaagggaacaatcctggccggacgtggtagctacaatcccagcactttgggaaggctgaggcaggcagatcacctgaggtcaggagttcaagaccagcctggccaacatggcgaaacctagtctctactaaaaatacaaaaattagctgggtgtgttagcacatgcctgtaatcccagctacttgggaggctgaggcagaagaaccgcttgaacctggcaggcggaggttgcagtgagctgagatcgtgccacttcactccagcctaggcaacaaagtgagactctgcctcaaaaaaaaaaaaaaaaaagaacaatccttttcctcaattatcctgggtaatttgatagatgagctatcatataatcccctcaattgatctactctgctactcatgtgcccacaaaaatctaggcagcatactactgacaatgtgagcttcagaaagtctttcatccaaatggattccaataccaatgatagaagaaactagtaaatatattccttttccatcttctttagtgtcaaagcacagatacaggtgactgcatcttaaacactgcccagttttcagcactgtttcatttcctgaattccttcttcctaactgtccattagcggctttgacaatagtgttagccagatagtctcctttctacacatataaggtgcaaaaataaaagattttaaactgcagcttgaaggaacaaagtattgttatgttggtcaggttttctatggattagacgttaaaaaacagtggcaatagaaatattggtactcttctctgtgagttgatatgaaggctggaaatcagccgcctaagatgatcatttaaaggtaggggatggggccaggcgccgtggctcacgcctgtaatcccagcactttggggggccaaggcaggcagaccacttgaggtcaggagttcgagaccagcctgaccaacgtgctgaaaccccatctctgctaaaaatataaaaaaaaattagccaggcatggtggtgcgcacttgtaatcccagatactcgggaggccgaggcaggagaaccgcttgaacccgggaggtggaggttgcagtgagctgagatcgtgccactgcactccagcctgggtgatagagtgaaactacctctctaaataaataaataaataaataaataaataaataaataaataaataaaataataaaggtaggggatggcaaaggaagaagccttagtatttgccccttctagcctcttgtttctaaaataacaggtgtaatttcagagccccaactgctaattccacatgcaaaattgttttaggcaatcctcccaatgcattctagagacttttcagggtcatttttatttgttagatttccacggtattcaagtttctaagtaagcaaaaattatccgttgccaagtaccatctttggggagaggagttgagggaagaagaaaaaaaggacagagaagaatataaagaaaagctgaaaaaacatagatcaggccccaagattccaggtttccagatgagcaaatgcccatctggcccttctccccatgcaagcagtgggcagtgaccgtgggtgcttactgcagtgggtagaaccagtttctaaattcaaaccctccaggcagggaagagggcaactggctagtgaaaagagaaatgctgaagactgaaagctgaactgaagctttccttagaacctaaagaacacaaatgaattcatgcaacaaatattctgagcacctatccatgccagaaactataagagatgcccaatatgtagagataaataatattcaggccttggcctaggggcactaagagtctaatagtctaaccattaatcaaacagcaacaataaagggtgataaatactctatgtggaagtgtactcagagtgtatcggggtatactgggacagagaagcatctaactcacaaggaatatatccagaggaaatgacacttgaaatgaattttaaatgacaggacttaagagacagagaaacaaggagtacttgtgtcaaaagagagaatgcaaaagagtatgccataatttagaactttgcaacagaaaaggcagaaacacagagcaatttatttcagaaacacccaaatttattttaaaacatactagactccagacccagagagtaaggatggatgcttataaaactgcttttttaaaatgttccacatatgtggtccaatgggaattttaagaaatgcattccattccttgttgataaaatagaatttgggttatttactattttgaaaaaagaattttctacctgctagaggtaaggacgtaggataaaataaataacaataataatgataataaatgggagatgtggggcatggcatagcatctatttataaaagatcttaacactttgtgttttctctctcattactttcctatcaggcaggaaagtaatgaagactgacacaaaattaaacaattactagtcactagtgattggagattcatttgtttaccattcattcttccacagatatttacggaagcgcgtattaagtcggaggccatctttctaaggtattagaactacaacagtaaacaacaaaattgtaaaggaatgtcacaagtaagctgaaatgccatagacatttcagctaccaggctgtgggaaaaaaggatgacattgaaataagaaaacgatatggccagccaggaacccgtttttctaacagagaacccctggatgtgcctcaaagctaactaaggctctggtcatgtcacagaggcgtgattaaaccagccctaatgactgagtaccttgaagactctggatgttaatgacagagtatcttttgcacgctgctttccttttagtcagttcatctttacccagtgcagactttaatgtttgcaaaaaccggaggccggcgcaactgaaatggtcaggccttccctagcctcatgagagaagtcgctgaattaatgaggaaccagatgtaggctcttcatagttggagccgccaccccaagaaaagctccagggaggggaagggaagtaagcaatggccaacccaataggaaaccttcacagggagtggagagcattttctggccagattctgcaacactgagacttgttgtctccactgtagcacaactacagccaagctgaggtgagaaaaaaataattaggtcccaaatctgcattaaaacatttttgcagggttttgttcttgaagtggaaaactgttcccacaaggtctatttttaaccattttattttaaagagatcagaaagccacttcatgttgaaatttctcagtggggaattttacagtaatgctacttaaatccaacctaacgatgacaaagcagaggaaatgagtgaatgggctaagtctgtggaaatatagcagcccctcccgcttaaatcaatgtcatggctcagagaggctgtgagtacaatatggtggtatatatgcttcctttctgacacaattcaaaagtcaagcagaatcctgaattttaggaaagtactagttcacagtcaactttttctgttaaacaacaagttttaatgtttttttctccctaaaattacgcaaagactactagtatttcaagtgattaaagacaccttggttataataaactgaggctatgccccttggtgatttcacttgtggtgtcaatttatttagagaaataaatattcggctaggtgcggtggctcacacgtataatcccagcactttgggaggccgaggtgggcggatcacttgaggtcaggagttccagaccagcctggccaacatggtgaaacccccatctctactaaaagtacaaaacttagccaggcgtggtggcaggcacctgtagtctcagctactaggatggttgatgcaagagaatcacttgagcctgggaggtggaggttatagtgaatagagatcacaccattgcactctagcttgggcgacagagtgtgagactccgtctctaaataaataaacaaatacatattcaacctactatccagagtcagattttctattagaggcagaaaaaggaatgtgattatcctgagtatacacttcagtaaaataaaatcaaaggaaaaactcattgaaaataaatgacatagcacatttcatcgaccaaatatttggtggtcatctactgtgtgccaggcacttgagatacaccatcaagaacaaacctctgccttcatggagcccttattttatcattaaacacacaaaccatgttgtagaaattagatgacctggcataaggttggccaagttgtttgtgattcagcttaaaatctctcaaagggctgaagtgaggagcattaaagaaggagaaagatttctagaacaaccaatctctgcagataagaatatccagtgctgtaaatgcaactacctcaatgccctttcttattctcatcatcaccacaagtccaggtttagaatcttccagtgattccattctagaacctgagaactataaacaggcacaacagtatgatgaggatgtcatgccagtgggctgtgttgcagtaacaaatgaccccatcacttcaatggctttcaacaacacatccattgagggttggctgtgggctatgctccacttcttcatggtgagacccacgctgtagagcacctggcctctgagacgttactgttttcatggcagaaggaaacatgagaatggtgaagccataaaatggcgcttaaagcttttcctcctaggtggcacaggtgacttgagctctcatttcattggccaaagcagataatacagctagatgtcaacagctcaagaatatatcatcctacaggcagcaacagcaaacaaaacactcagtgatgaataggttgtagcatttatcagaatgcaggtgactaccaaaaaagatgtggaaaatatttctaacccttccattttcccagacatgtgattactattaaattgtgagtgaatcttctgaagggaaactactccctttcatgtcataatttctccccagaccagtagcacacagaacgtaaagtgaaacaaaaacagagcctggagaagttagagaaaactaatttttctttctatggttagatgtcaaacaattcattttccccctcaatcattcctttccacatgaaaaaaaaaaaggaactctataatgtggaagactacattctatattttattttgtagctagtaaattcttcctgagatccacatggtactttatacaggcaggaggaaggagacaggttatggtgacactaacctcttgaatttttgttatgcatcaattagatgaaattagaatacaggaaagacataccttagcaattgcaatgggcatcactggcctttgtttcaaaagagtgaccaagcaactacaagaacatgcacaatctagagttaaggagtattttatgcattttccccccaaaacacaaaagagaactagaaatagttcagatcagtctctggtcactcctaaaaagatgtggtcctaaaacagatttgagttggtattatttcagccactttggaaacagcctaccacttatgattcaaaatccatacaccatataaggtgtgctttggatgagtctttcaacttttctacatgtttaaacatttatgttaatttataaataaaacattagggggaaataatgagtaagcctggaccttcagtaagcctgaaaataatgagttagcctttgaaccccaggagcaataattctctatgcataatcatgaatgaaattcccttaccatgtgggaatttttgacaacctctataacctaaacaataaataccattctacaagcaagtttggtcccaggcatgtattcggccattcatccaaagagcattttaagttacaacatgtgtgtagaactctgcttaccagttctagattcatttgcttcaagcaacatgccaagctaccaaatcaacaaatggtcaattcaccaaagacagcgtgctgaatgaccaattttctaaattcaccaggtttatgaacttgttcctttaaattatttatggagtttgcagtagtttgtatataatgggatggagtgttcttaaaattgttagatttctgaagttcatgacaggttttcctactgccttcatagtattaaaggaatggtcaattcatcaaaagctaaagatgattttgttttcttatgaatgtttaagatctagaaaaacgtattccataattagtaaccaatgagtcaccagaaagttttaaaatatatattgctatgttttgcctcttttttcttttttttttttttgagacagagtgttgctctgtcacccagattggagtgcagtggcacaatctcagctcaccgcaacctccgcctcccaggttcaagcaattctcctgcctcagcctcccgagtaggtgggactacaggcgcccgccaccacgcctggctaatttttgtatttttagtagagatggggtttcaccatattggtcaggctggtcttgaactcctgacctcaggcaatccacccacctcggcctcccaaagtgctgggattacaggtgtgagccaccgtgcccggcctgttttgactcttttatgaactcttttgtttgttgggtttatcgacctattaacctttttaggatttttttaccttatgcatcttttaacgcttttgcattactcttgttttggattaggtgtagtatttaagaacatatcttccttatacaataaagccatctagtagaaatcaagtgcaggtgactggaatgtatgctcaacaagggcaagttatggtctagttcagaggtggtaaactatggttcatgcattgcctgttttcataaatcaagattttttaaaaaacgcagcttgaacttgttttatgtatttctgtggctgctactacagaaaaagaaaaaatgtcaccgtttaatggttgcaatagaaatggtgaggcctacaaagcctaacatatttactatctggaacttcaaaaaaaagaatatttgggactagggatctagtttattacagtatccacagctcctggagcaatgcctgactcatttaggagggctacataaataccagttgaatgaatgaataaatgactcctggtttttaacaaatggctaccccgcattcatcactcatttcagtgcttactgtctcacaactcatgggctggtgagaggtgttggttcttcctagtgacacagaaattaggcaacttgagtcaaggggtaaagcaaaccacctctgtggttccaggactaaggccaattgtaatgcagatgattggtttgcggcaacgtaaaaaccaactcacatttctgcaaagactatattgggaaactccaaacacaactaagccggctggtctgcaaaaactcaagtcactgtttgtccctaaaaagaaaagaaaatgtaggttggccaatccttcttccctcttctgaaggttggcagtgattttgtggtcgaagtgatgagctaccctgaaaagtcagaaggaaaccacaaaacccacgcccattgctcctcctaagctacagctgctgctgcacacagcagaaatatttatattctgccagagatcccccaggactatcctggatagagtagcttctacagacgttattctggtgggaaatactacgaaaaagtcaagtgctgatcaatctattgggaattttctgccatttaacacctgttaaggaacctgtaaccagacaaaaccaagtgagctagaattttattgttgtttaatttaatttatttatttagacaggttctcactctgtcgcccagactggagtgcagtggcatgatctcagctcactgcagctccgcttcctgggttcaagcaattctcccacctcagcctcctgagtagttgggactacaggcatgcaccaccatacccagctacttttttgtcttttttggtagagaatgggttttaccatgttggccaggctggtctcgaactcctgacctcaagtgatccgcccgccttggcctcccaaagtgctgggattacagtcgtgagccatcacgtccagctcgtttagttaactttgaatggcaagtggcaggatggttgattggttggttgagaggtgtctagcagtcctactttaatttcctcttgcctgttaatgccactatgattaaggctcctttcctccccatccccatactaattcctaattcatctcagtaaaattccccagggtagaacaaggacacaaatcattactatgaagctgtaggggtaccctaagtcaactcattttctccaaagcaggaacactaaatcagtccttggtgcctatcacttttttttggtattctgggtataaaaatatgatatggcggccaggcacagtggctcatgcctgtaatcccagcactttgggaggctgaggcaggtggatcacttgaggacaagagtccgataccatactggccaacatggtgaaaccctgtctctactaaaaatacaaaaattagccaggcatgatggtgggggcctgtaatcccagctactcgggaggctgaggcaggagaatcgcttgaactggggagacagagattgcagcgagccaagatcatgccactgcactccggcctgggcgacaaaatgagactctgtctcaaagaaaaaaaaaaaaaaaagaaagaaaaaaaatgatacggcatcatacttttgttcaaagagaatttgttgtctgggagaaagaaaggcctaagcccatgtaatatcaaggttgaaaaaaatgaaaagaaattatgttcgaatactaatgcatactcaatattcagtgaggggttctaacccagctagcacaccccagaggtataagtcttgtctgacatcaccaataaataagagggttcacttatgtgatttgaatttttcttttgagtatcggaacatttaaaactagtcctgggcacccagcctttgaggaggaaaaagtcaacttttaaggttccatttgtttgacatcatcccctggtcaacttcttgtaaaacttctttggccgctacactgcaattcttgagattacaacttatttctaagtaatttcaggaaccatccgacaaggcttatccttattgccctggatggtgctgccaggaaaagcaatgataaaagctcatcaaaatcatcacagctatgaaacagccacagacaattccgaaaggctgggactaatccttgagtccactcagtctctctcctaaaggcacatctgttgacaactcttttctttctggctttctaagatccctcaataccttcatagcaggcaaacagacaaacccaaactagagctaatgtcagcaaagtccactagcgaagcaatccttgtaacgaagtgcacctggagagccctttggagtggtagggaactatgcaagcagctttgtgtggctgtcttttcagagaccacagatcagctggagcttagaccaggcagccgtctaacagcattagcaggtaaactgcagtccgacttgaatgtacattttaaaaatttgaattacacagtgtagttcctctgtaagaagacttcaaagttttcgtgccagaaaggtgcaaagtgacttctgccttcacatttgtgagcttttcaccctctcaaccagcttatgagtgtcacttggggatttggagagagtcggagggaggaaggaaatcttttctctttgtgtcttcagagagactcaggagattctgcttatgtacatagaggttaataagtgactttaattgaaaaatggccatacacttgaaacaagattttgctctgaaaattccttctatctgtttaagcatgaaaagaagaaaactaaatattatcataccttcctctcctttctccacgccattccttggcatctgctactccatcccagacagcaggaaaacaagaaagagtcttccattcccaaaagcccccaaagaagaatgaagggggaaagggattggcaaatatccctttggtgtcattgcttgggaaagagtagaaatctgtgacaagtcaagcctaccttcaggctgtccagctgttaaagtctgcagccacttggaggtgctggaggtaagtgagctttttcttagatgcaatcattactgccaaatgtagaaggtgggcagtcggcttcataccacccaaggataaacagccactgattacagtaaacacgcacagcaaatgcacatcaaacacatcctgcttcaaattaccgttgtatcattagtgtgcaacagtctctatacttttcttaacagcatgctagaaaaaagccccccgcccctcaaattctcttctattctgttcattgcactgaaatgaaactgtgtgaatcccactaacacttaaatattcacctgctgtgctgctttattaaacaagcacttaggagagtggtttgttgggaaaggggtgggtatagcacccagctacatgctgcaggatgaatgaaaaaggaacttgccatcacatcccgtcttctctccagctttctgtagcagcaacctggctcaatttcccttgattagcacaaagatttagaatcacttttcaaaaagtgctaatcagctttagtttcaatggatcgaaatacaacataaaagtggttttctagttaatacaggcctgctgattttttcccgtgagtgcagcattagagatgaatctaaaaacatagctacaaataggtgtttattttgaaaacatccaaaacatccagctaccatacactgttgaaggtgagaaaatggtgtcaaggtacagcctacctatcaatatactcttcaagataaataattacttatataataacttccctctaattcatttcaggacagaaagtattaggtactaaagaataaagcaaataaatcaacactcatcttaatgcattccttccaagtgccatgtatacatgtgaaagtaaatattttaagtaaatatcaaaagatgggaacttgcctagagatttacatgtaaatttaacagcaaaatcaaattgtcatattaagccaatgtttcttaatatctaaagtctaaagttgttctggcaatattaaccgtactggcaggggaggagaaggaaaccctaaaatagatttttttttccctgaaaatggaaagtaacagacaaaaaaaaaaaaaaaaaagaaagaaagaaatctagaatgtcatctttgagacacagtgatgaagacacatgtcagtgcctcctacaggtacaaaatggtaacataccattagaggaggggaaactatttcttggcttaaaatgtgatactgaagttcttcaagagactcctaccaacttgttccaccaagacttttcttcctgtcctgtctctgtatttttgatagccattcacatattctgaggaaatttagagcttctccctagtagatatcctatgaaagaattcattaatctttttccttctctcatatgtcactataatccacatgtacacctgggggcttcccaactccattatctctgtaaaagccagcatttctgtggactgctccagtggacattggccctttgacctttaatcaagggctggcaggagatcctagagtatggtggaatgagcttagaattttgagcctattgaacctggtttcaaataccagttaaaagttgcatgactgtgtgcaagccaattgtgtgacctctccctgaatctcagttttaaaatgtatacgatggaacaaataataaacacttcacgaatgagatgaatatatttactaaatacctgacatataaagatcaaaaaatagcaaaaaatagcaaaaatagcagtatatataaaattgtaccttgtaaatgagctggcttcagaataaagtttttgtttgtttgttttgttttttggtatttcaggaattaaatcctctttgatgtagtacaaaatggaaaccaccttatactgcactgaattcattctcatggtgaatgctattcactagggttccagtgttctgttagtttctttccattccagtgggagctctactagaaatactactacacaagtggcatgccagtcaatttgatgacacaaatacttggtgctacctgctatgtcccccaaatataaatgagcatgaatactcctactttcaaagacaaagcagttaggttgttgacttagtaaatagctactaaaacaaattgccacactactcaacttatgtgacggatgattctcctgcaagttggctaagcaccaaaatgtcaaattccaaagaaaagctacactttagagataaaaactagatatttacccagtcatcagccaccactgggcaaaatcctgcagaaactcctagatctctgccatctgcctgttcgtctcattccatgttcaaggcaattatgtccattcccatttgtcaatttcagaaggggtggtttctacctgctatgaagtggtgcttaaatgggcaaaattattcaagggcttcaatcttcctagctggaaaacccaaataatataggacagaggttaaaagcttaagatttaaaaaaagaaaaaaagcttagaatctgaagtcagatggccagagtttgaatcccagttttatgagttcccagctaggtgacttttggcaggataactgatctttctgtaccttaatatgcatctatataacaggaatgaaataaatcatagtaggcatgccattgacgatatagcctctgtttaacagttcaaccaagaaagctttcttgtcataaaatgggatcacctttgtcttttatttgtaatatataacaaatattgttatgtttatgttctagaccataccttaattttctaagatatctattggccaattatttttttaggtaggtctttcagaatagtatttacgtgactctgagatatttccttctccttgactaaggcaggagaaattttccaaaaatattttgtaaggagtttgcatcaagcaaaacatgtttccaggaacatcttcaacccttttttcttttgccttgagacacagtctcactttgtcgccaggctggagtgcagtggcacgatctcatttcactgcaacctccgcctcccaggttcaagcgatcctcctgcctcggcctcctgagtagctgggactacaggtgcgtgccaccacgcccagataatttttgtatttttagtagagacagggtttcaccatgttggccaggatggtctcgatctcttgacctcgtgatctgcccagcttggtctcccaaagtgctgggattacaggtgtgagccaacatgcccagccccctttcttactctttctattcattagtttctctctttctcattgcttatctgacctctctttttgatcaaatatccataatttaaaggattattatcaagaaactgataaaatacaataagactattatatttaaatataatgcctcttctcgggcctggcacggtgactcacgcctgtaatcccagcactttgggagtctgaggcgggcgtatcacctgagctcgggagtttgagacctgcctgaccaacatggagaaaccctgcctctactaaaaatacaaaattagccgggtgtggtggtgcatgcctgtaatcccagctactcgggaggctgaggcaggataattgcttgaacccaggtggtggaggttgcggtaagctgagatcacgccattgcactccagcctgggcaacaagatgaaactccatctcaaaaataataataataataataattaataataaataaataaatataatgcctcttctcagaccactaatttttaagaacatagtaaaagcaaaaagtctgcagacttgcagaacccagacaaacatgcagttcatagaaatacacatgaagtcattttcacagaggttatcattttatgctataatgaactgtgtcaagattatggtgaaaataaaaatgatagatgatataataatagattaaataaaacaattacattcatatagattcatggtccttgtggatggagacagcatgagtttcagatcttcaaaattggttgcttaacagcttgggaaatcggctgaataaagtaatataatagttctcattctgcaaaaccccaaaggccattgccacatagagtcacaccactatatatatatatatcctagaaaggacaacatgggttagttaagtgttctataaatggcctagagaaagctgaatgcttgctggacacccaggaacctcaccattttctgatctcagattttagctaaatgcccttaaaacatggcatctaaggaagccagaagctgatgtttctctttacggtggactctcttgggattccctatttctctgcttattcaagatctgttcgagttccacctcctccccatttgccttccatatcatctccagcccctgctatcatcctttgtctgaattctgctaatacatgttgtcatttagcacttaccttctgctcccttaactattatagtaagtaatgctgcctatcttcaaacctcagcctgcccatgcctgtgctctttctgctattaatgtactcaatctttctcgctgatgcaaaaacctaatctgatgatattcctacggtcaaccaagcacattccaagccctgatggtggttcaccaggagctcctgcagccacgtaagagggtatagaaagtgttatttccaagggagaggcccttctccattcctttgctatgagatggaatgcagttgtgatagctggagctggggcagctatcttggactccagcatgtaagatatgtgtttaaaatggtggagcaacaaagcagaaggagcctgggtccctgatgatcacggagcctcgttaccaggcctgagctacctaaattcaggtgagtgaaaaatacacttctattttgtttgagccactatttccttgagttttctgtcactcctagctatttatcaccctaatccacaccgtaactaattcaagtttttaaaatatacaccgtgagttaaaacacattcaacaaatttagctcagggactctctgctctatagcctgtaacggtgttagcatttttttaatctataagcactagaccatattttccttaaaaagctagagttatttctcatgtgatttcatatcctaggggacttgtacagagcctggatcaggggagcccaataaatctttgatgactatagaaagatatgtgttttacctccacaatgatatgcaagtacctaaaggtcagcaattttagtcatcagcatggctatacacagaaaaagtgcctcatatacctgttttgatattgctggcagattagatgtgttcatcctccctttctatcctcagaaaacagtatccaaaaattactttgcatacaatggcactatattatggaaggaaagcaatgtgccaaagttataaaatcatcgtgagatctaactacataggaaaattcgaacaacatctccattatttcactttacagcatagaataaccatgcgatttaattactctgccaactctgaaaaacctatagctgggttctggcacacaatgtacagtttttatatgaaaaaaatgataatttccctgacaaaaccacttagaatagctttcagaaaacatatgatcaaaatgcatgaaaaatttgtccccccaaatttactataaaattggcattgtatcttttacatcaacatgcaatacatactgtctatgctggacaacagagtaagaatagtaacttatttcagtggtttctgtgctgacttacatacagtagagattcactaaatattttttaacatataccaaaagtttgtatgattcaaaagttatttgaataatatcaaaagttatttgcaagtgataatataaagtttggatcagtcaatagtagtggtcctcaaccaggagcaattttgcttcccaagaaacctttggcaacttctagagatattttcagttgtcacaactggggaatgggtgggtgcttctggtatctagtgggtagaggccagggatgctgtttaacatcctacaatgcgcagaagagcccccacaacaaagaattttctggcccaatatgtcaacaatgtcaaggctgagaaactctggtcttacattggcttgaagcaatgcatattaaactcatagtaggcagggcaatgttgactttccaaatgacatagcaccttgagagttcaataaagatgaagagagtctatagttgttgacaatgacagtattcttagcttcttagcatagggaagcaaagaataaactgggtattcccaggttcgggtctcttgatcattccattaataacaatagtccttcatttccaccagtgaaggtgaaggtgtgagcaagttcaaggtagcaggtcctccaagatctcatcccatcttgtaagatctaaagattctataaaagcactcaacttttctttttagagatgtttttcgtttcagtgcagccgctactacaataactatcaccgttagcttgaaagagaaccagacataatggagggcaattattttctcctcttttacccacagctctccttcctccttcctccaaactactcccagtgccatgctatacacccccatcctgtgaccaggcctgcaggcccttctgttcccacagactctaccaagtttctcaggggatttatggtgacttatttaaatgcaactgatttgcccacaagggccaactcaaggaaaataatttccatcagccccatctttcctgagctttgtacacaagaacaccaaaaggcctttctttctttggaaaataagttccttttcctaattggagtcagttttactaatcaagattacaatgaggctttacaagcaacgttgaagaagggagcatttatgcaggtcagtaggggttttcctaaacattttgattacaactttaactgctctaaaacacatgtaaaactcctatcattaaatttaaacagcctgatgatatgccaaacaagactatgagaatggcaaataaattgctgtaatctgccatactgtcacttaccctgctcttgagcagctgtaattgactaataggataataaggtggcagtttacaaatctgaaagctatactcctttgttgagaatgcccttgagtgaaaaaaaaatgctctaagtcaggaagacagagtgggtgtgatcaaaatcatggccctggattcaatatatgtaaatatgcttttcctatgaactcaaaagaagtcactgaacacagttgtatgcaggggcagcaccacttgtcattgcgtttattgaacctttttatccctcctcacataaaaaatattcagaagagctttacccactctaaggaccaaggttaaaggcagcatcctaagcaggagtgagggcaagaaaggttttcttttttcttgctttttttttttttttttttgagacggaggcttgctctgtcgcccaggctggagtgcagtggcacgatctcggctcactgctacctctgcctcccgggttcaagcgattctcctgcttcagcctcctgagtagctgggattacaggcacaggctaccacacccggctaatttttgtatttttagtagaggcggggtttcaccatgttggtcaggctggtctcaaactcctgacctcgtgatccacccgcctcggcctcccaaagtgctgggattacaggcgtgagccaccgtgcccattcaagaaaggttttcttagcaccagtccactgatggtagaggttggctccatccttcttctgacagtggtttctgtttccagtttacctcctgagcattgaacatgcagagaaagattccaaacaccccagaactacacaggccactgctaagtgatgcttaaggacttgtcagcaaaggctccaatgcattcacctaggacaatgcccaaagtcaatgatctcacaaggatacatatgacatgaggattcttgccagcaaaagccagcttgaatctggtaagaaaactgctgctactacttctacttctactattgctgctgctgctgctgctgctgtttggagaatacttgtcaactgggagactgctgaggaagaagagggttgggaggtcgcatcaaactacagaaccctgtatgtcacagtgaggaatatggacattactgtgagtgagatggaaagccacagaggattttgagcagaggagagatatgagctgacttatcctttaaaaggattcccctggtggctgctgtgtggagaagagtttgtagttgggccaaggtgggaaatggaagcagggaagaagagagaggctattgccatggtccggtgagaggtaactgtggcttgcaccatagaagcagcagtggaggtggtaagaactggttgaatgctggatatatcttagagctacaatgaacaggatgtgcagatgagttggctgtatatgagagaaagaaaagagtcaaggacaacggcaaggttttggcctgaggaactcagagaaaaggctcgctttttactaagggggaaaactgcagaagcaacatattggggagggtgaagagacagaaatcaagaacttggttttgaatgttattccaaaatatcagcatgatcttctacatttaaaattgtgtttactgtttcatttctaaacattcctgagagagtagctgaaacattacagtacacattatatatgaatgtataggtatatgtgcgtgtgcacagaaggcaagaatggattgatggatgaataatcttccattcatactcttctttttctttccttgaacttatttctttcagaacagaaatatccacgatatgccatcatcttccttttccaagtgaactctctgctaaataaataacgaaaatattctaagtacaatcaagtaaaagaaaaacatgagcattttccaatctatcaacagatgaggcacagaaaagccatttggacagaagcaaaggtctccaagaacaacaaaagccacactgttaataccacagggttggataaacctgttccatgccaaggccatatggaaagcttacagggagaatggcacgaagaaacaaaaggcctttggaaacctctgaggattgctgggtgaaaatggaatttgggcagtgaggcaagaaggatccaggctgacctccatagggcacagtaacatcaattcaagatatttgcactcaagcaggctgctaaacccccgtgatgctgaacacttgagcttgtcccaatccctggtgccttccgcctttcgctgcagcctggactaaccacgctttgagcaagtgaaacgcttgccactgttgctgtacttctgagtcactgagatgagacagtgaccagtaacaagactccctccttgattaaatgaaatcaggttcctctaagtcctcaaggtctcgatcttacaagtccatccttgccagacccgttatcacctagttttagcaaaaatcttgttacatcacttgagaaagaatccccacgctggttatctcaccaaattcatcatctctcaccattccccaggtgagatctgatcaccctggcctgccttcagcacgactcctgttaggtctgtttagcaagaatcttccttacttctgatgctcccttttaggggctatctacccactgacccctaaccctgccttttggctacatatccccacttgttcaagtatgttcagaattgggcccctactgcaatagttcctgactaaaatctgtttttactactctaatcactctctggttttggtttttctttcttttcttttcttttctcttttcttttactttttttgttgttgttgagatgaggtctcgctatattgtccaggctggtcttgaacaactgagttcaagcaatccttctgccgcagcctcctgagtggctgagattacaggtgtgtttttctttgacaccagcagagtaaataccccttggaatatttccctccatgctggtcctgttggtgttgtgtatgaggctggtgtttgggcagcaagggagttgattacagcagaaggttcctaatcccacctctacttcacaacgctgttataatgaacagaatcagtccaaagagaaaacaatgaaaacgacagtcttacttgtacctatattcctagtatcacttgatcccccaacaccacccccatcagctccctgcctttaattcctctttaagtaacccgggagagatacgtccctttggggactgaatttaaagtgactatgaattagttatgccacatccttccaaccacaaccaggccctgtttaaaagcagagaatggacagtgtaagtgcctcttcccaagacagccacctctgccacttgtagttagagaggctgcgactgatctggactgcggcaaattaaatgtgttataggcaacacactctaaataaggccgcctcccttctcgcaatgtccagtttagtcctggcacctcatttgaggaggtgagggacagcaagaggaaatgacaggaagtgataaaggagctaaaaatagatgtggaaatgtgtagatatgagagtttcactgaatataaataggctgattagattaagcatcaactggcaaatacaatgtctataagcttctgggtttgctgtatcaaattgtcacaacctctgatgggtgaactaataatccactgtcaattcgatcatgatgtcatcttagatgacatgatcaaaatggtcgtgaaccagggaaggctgtgaagttacagtgagtgatttgataacatctggcttgcttgggctcggctctaatagggtctctgtggggtttacctctgatttggtaaaagcattctacaatccaaaaatatcaagcgttgtctacggacataaaccagtcatgaccataggagttataaacgggtttcaatgttttagttgacaaatgctgcaataactgctacactttattgggcacctgttctggccaggcattaggctaggacagaaagaatgaagacaatttgacaggcatggtcaatgcaattatattataaaacatagcagggccagcagagtccactcacagccagaaccctaagtagtttcaagcactcaaaaatcaaacagaaaacaacttcacgcaagactgaagggaagtcattaagacccatccaggtctgagtgttatacgaaaatgttactgtcgttaattaccttccaataataatgccaattacagaaaataatgagaatgtttacccaccaaactaatagggactggcatttcaaagtctaccagaataacctaggcaacaagaaatgttctgattctcccatgtctggatgtttttgctttttcttcctttcctgctgacccacttcaaaggtttcatgctggaaacactaatcatgtcctcctttgctggagtaagttaccctcctttttgctccctgcctagtgcctccgttcgcatccaaagtaacgctcattacctgcaaactcaaacttccagcagcccacatgcagatcccagcacacagatatatcattccacattggcctacctgatttacagatcacatgggtttctgaaatacagataaacgggcacttggggaaagcagtaatgttgtaaaacgtagagaaggtcatgcatgtatattttacctggaacctcacaagaattgataacatttgtgggatttcatttctacctacacagaaaacacatattctaagggtttaaacttgaaaactcacattcaggcacacatgcttatgcctgtctatggatgtgtgtgcatgtgtgcacatgcatgcacaaatcaagaagagtttctatttaaagacaacttgcaccaaaaaaatccagattactttacaatgcaaatcatcatcttttgtattttattacgagcttcctttagtatattaatttctaagcatctttaacacaaatcatcatatacatacaactctctctttcagattcagagaaggagttaaaaatcagccaaaaaagaaagcaaaaaacaatgaagataagggaggagggagtgtatatggagcaaaaggaggaagccagctggttagctggccttttaaaaggtatcagggaattaggcccaaggccattaatcctacagttttcactcctctgccaactctcacggcttacattaccgagccatcatccagattaaaaatgggtttccataagggtttctgcttccccaggaaccctcctctctaccctccccacctgctgccccttcacacagcagcaaagtgaaatccaaaagaaaaatattaaaatcaaacaaggctttagggatttggggaggtggatggagaacaggttcttatctaggctttagcacaatattccttcttcaaagtcttcttaattacattgagagaaagaacaagcgacaaacagaagagctgccttctaaattcagtgcccctcaatgaagggttcaggttcacaggttctagccctaagggagaatgatgatctgtgctcagcttcttgccacccagggtcccagccccccagcctctgcctccatgtttcccttcacccccacttgctcagcttcctccctgctctaagaagtgcccctacttgacagctattctgtccatggaatttccctgctgggcacctacattttatttttcaagtggaaagaatgcaaggttaaggactgtgtttctaagatcccaaagctgcagccagttaagaactgaataattcaaccagaactagttgttctgtccatactagctgcatgtggctttatcccctgtaacctagagcttgtagaaatgagaaaattaaaccatatccagcagggcacagagcgtgcacattgtccttccgagtagattcaaaaggagctggtagtcatgcatcagatggtgtggcagtcttactgttaagggacaagctaagggctgactgctctcccccacgagtggaagtgccaaagtgggtttatctttactgcaggtctcctgtgtgctggaatctgtgctaggcactgttcctgctttatttcaatgaacacttgtagcaatctgaaaggtcatattggctaaggacttgagctctggatctaaagcaggccttgttttcaatctcagattcagcactttccaagagtgtctttgtagcccattgccgggcttcttttctctttttttttttttttttttttgagacagagtctcgctctgtcgaccaggctggagtccaacggcccgatctcggttcacttcaacctctgcctcctgggttcaagcaattctcccgcctcagccttccgagtagctgggattacaggcgcgtacaaccacgcccagctaatttttgtatttttagtagagatgaggtttcgaggtttcaccatgttgcccaggctggttttgaactcctgggctcaagcgatctgccctcctcagcctcccaaaacggtcggattataggcgtgaaccaccgcacccagccgcctggaatttttaagcctcaagtttgttccactttgaatgcaagaagccacctcataggtaagaatattattgaacataaggcatggcacaaaatactttctaagtgattattgtccttgttatacccactttatagataaaagataaagtcatttgtccagaaggcaaagccaggagtggctacttaatttttcttgaccccaaagtgtatactctttccataacttcctgttgtctcccatggacccacctcaaaatcagaggtgtcacagtggtggtttaacaaccaaagtttcaaattagccatatacattctgggggcttccaagatcccatactggggtctccacccttatttccttgctctcagaagtaatgtgtgatgaacctgttctttggaggaagtaccttcctgtgggctggctggcacactgtcccaggcaaggccagcctggggatgttctagatgttcactcttttttctagtttcaatcctgcaaactcagtggacagaaggagctagggacttgaaagcatgaaagcattggattagaaagaaaactacaaatgcagtctgtgtaacagaatcatggtattttcatattgagaaggctctttttgattcagccattgtttagttagacctgtacaagttgaattcgaacttattttcccactgttacttttctaggtttggtaaaatgtgtgaatggctgtggatcccatgaaggtttttaagttagagcacaaaacgtcctaaaaagcacgtgactggccttgccaggcagagcaggatgtaaggaaaaaaaaacagaaactcagggaaatgcaagcatagattccaattctatttgttatcttgcagcaatgtatttatggtagatggtttccacattacctactaaacccagacggcaggaaaaaaaaaaaaatgaatgaacacagctcttccaagctaagaatatgactccaatcaggtcagtaaatagtcaggaaactacggttttatcaattcctgatttgttttgattcaaaacactgacccccaaatgcttcctttttttaccctctaaatctgaagctggtgaaaaatgaagtgattgataataaagctttcactacttccaaaagaaaaaaataaatgaaagcaatttgaataaagggccatttactctcctattctttgaatacatttattctatactgataagcacacatttacgctagagagaagatggtcttcagaataagcacttactaggattaaatttacattatctgtctaaatgcacacacattttagactggcagtagtatatgttgtgctcacattttgcaaacactggaaaggtgagtttttaaaaatacagttttacaactctagaagttgggagaaatataatttcctaatactagctataggaggaaaacagaaaagtgacctattttaatgacaaagcattcataatatatcttccccgtacttaagaaccagcttcatctcagcccatcaccagaaaggagagaaatctcgtgtataaataattaggcaatctcaaaatgagtctgcagatgctctgagataagcctgctgacaaagtcacaatgacagcttgctaacgtgttcacaggacatcagcttctcttaaaagctgctttcggaacgatcagctgggttcctactgagttaaaacacaagcattcggaggcagcttgtgttcaacagctacataaatctattaatccaactagaggggtgggggaaactgaagattacatctcaaaggccctcaaggcctgtgtttcaaggagtagcaagataaatgcaaccaatataaaataaagcttatcagttgttggtgttttagatgatgctacctttcagggctggggagtcaggaaagtacatgtctgagaaaaatgaccatatgtggcaacttgagcactgtttgccactgggcatcaaaatatcttaccgtgtgctcataagagtggatctaaactcaaactgtagttacatgagcaaaagagccccctgatgagctggtgaagttctccgttcaactacagcaaaatggactgagctcccatcacatgccaggtgttggtctaagagacggatttgccgaggtgactacacggaggtccctgccttccaggggcatgtgtcatggtgggaaatccaatgagaaaacagttcgcttccacacaatgtggtgggtacttaaagagaagtgttctgtgggagcccagagcagaaaagtcctgcctagaggtcaggaaagatgaccagaaatgacgcctgagctgactgatggtctggaagcacccagcgaagaagagcaatgatgtttgctaaggcaacgtcggtactgtttctccccaaaggcatgggattttatacacaccacctgcttttcatatagaaaactcatgaggaagctcctcacattgtttttaacagcaagttcaaaacaatcttattatatgattattgtctgccagagaacacctgggcatgaatgcttcctgagttcattccaattcatgactaagaacggtgggatacagcacagagccttagggctgatgccatgaaataaattcattgttggaggctgctgaccaccccaagtctaattctggggtaggtctccattctaccctgcaatcactcccctcactgacaaacgggctaagctgctatatttgccaagttgcagctaccaaagtaagtaaattcaatccttgggcttggagtcagcagaggcatggggccagccagagacccagcttccatagcacaggctgctgttcctaagccctctgctctcacaagcctgggtgccacacattcagcaataggaaatttgatggctcctgggactaagggtaaaaaaaggctgaagaaaagggaaaattaattttagcaaactagtagctaccatttattggtacttcttgatgctaagtgttttacattcttttcctcaagtaatcttggcacatctagggttcaagcactaagagcattctccaattcctaccaaggcagatacttgggtaaaccctgtacaaagtctcagtcttacatgaagcagagaggactcagtaaaaagttccagtaaagccagctttctggtctgcaagaaatgagatctagagtatcaaatccatcgttttccagggaccagagcactctttagaatacagtcatgagtcacttaacaatggggttacgttctaagaagtgcggtattaggagattttgctgttgagtgaatatcatagagtgtactcacgcagacctggatggtataaccttctacacacctagaatatatggtgtagcctgtatctcctagactacaaatctgtatatcacattactatgggcagttgtaacaccatggtaagtatttgtgtatcaacacatatctaaacatacaataggtacagtaaaaataggatataaaacataaaaaatggtacacctctgtgggccacttaaaatgaatagagcttgcaagactgggcactgctctgggtgagtgagtgctgagtaaacgcaaaggcctagggcatgactgtacactgttatagactttataaacactgtacactcaggctacactacatttattttaaatttttttcttttttcaataataacttagcttactgtaagttttttaccttagaaactttttaactttttgactcttttgtaataacacttagcttaaaacacaaacatattgtatatagctttacaaaaatattttctttcctttttcctttttttgttttgagacaggatgtcactctgtctcctaggctggagtgcagtagcacagtaacaactcactgcagcctcgacctcccaggctcaggtgatcctcctacctcagcctcccagggagcttggactacaggtatgcaccaccacacctggctaattttttgcatttttgatacagattaggtttcgccatgttattcaggctggtctcaaactcctgggctcaagcaatccacctgctttggcctctcaaagtgctgggattataggtgtgagccactgcgcccagcctataaacttttttctattttttttttttttacttgttcaacttttttgttaaaagccaaaacacaaacacacacattagcctagagcctacacagggtcagaatcatcagtatctctgtcttccatctccacatcttgtctcactggaaggtctctagggacaataacacgcatggagctgtcatctcctatgacaacaatgccttcttctgaaatatctcctgaaggacctgtctgaggctgttttacaggtaacttaaaaaaaaataagtagaatgagtgcactctaaaaataacaataaaaaaactatagtatagtaaatacgtaaaccagtaacatggtcatttattgtcattagcaagtactatgtactgtacataattgtatgtgctatactttcataaaactggcaatacagtagatttgtttataccagcatcaccacaaatgcgtgagtaatgcattgtgccaagacagtataacaggtatgatgccactagctaataggaatttctcagttccattaagatcttataagcccagcatcttctatgacgtcattgttgacttggccatgcattgttataattagctcacaccagcacttttatggcttcccaggcaaacaaaataaatggcaaaacatattaggaaaacaatataatgacctgctacaacctccagtaaccctgtgcaaagaggaaagaggatccaagggtgaaaaactaacatattaggcatcttcttccattcatttttttcactttctcctctatgcctgccaaggaaaaactcagattcttgatttaacacacattatcttcaaatagaatccttatcgttgtcagacaatgagaggaatgttgcaaatacatccaacaatctgggtataaggaatttctttctttagctccttagatgttcttgattttcccatcaaatctctaaccttacaaagaaaagttgttttctttttattccacggacaggcatgattctgagaattctgcgtgttactaccaagctccacaacctacactgtcataaatcattcattcactccatctgtatttatgaagctcttaatatggacacaacattgtttttgtttagatctgtgcccagcacaagggaagcatgagaccatgcatctggtctttctggtacttcctcatttgaggagcattttattatatccagctatatttgaaggttcaaactaagaagacgaaatagcaagttgctaaggtaaaacccccaatgcctttgaagattttaaggaaaagaacagggagagaggaggagtgttacttgactctaatgccagtttagctccatggattgcccagacatttgcagaacacaactctttggtgagccaaaacacccaggtaaatgaagggagaaaagaaaatactctcattttccacttaaaaactctatgtttattgttaatgtattagaacattgtataagtttcccaaagtggcagatcacccctgagttagaatcaactcttaaaataaaacacacgtacatttaaagatttatcatggattcaactaaacatgaattaatatggcattccagaaaggagtcagacagtattaaaaattattttcagtctccaatgattaaactcccattttcctcctttttcttcagtcttgcttgcccagagaaattagtcctacaacaacttgccacagacagtctttatcaaaatatcaaattaaatggcgcctctaatcaggaatgtacggacaggctcaataccaacatgttagtgttactgggtttgaaaaaacatgagaaataactaaaaataatgaatcaggccttcagccaaaaaatccgaactataaaggatgttctaatggcagaagctgggaacagtcaaattcttagatgcacttctcttgaacttcatttgtgccaattctcagagaatttgtaaagtatttcttaggaacacgcgttactcaagagacagtaactgacctgaagttcttaaaatttgttctttaattaactagaacataaagaatgtgtcttatcttcaggaacttctggttctgctaagaaaatcagttgcaacagcttcaagctaacagtgatactaaacatggctgcaaagaccagctcttaaggataactggaaacgtgagaataacttctcaaatatgaaactttgtcctatttccaggactacaattatctggaatccaatttctttttctaaaaaagaaagggaaataaaaagcagttcctataacaaacctgatgtgcctatgtccttcttagtttagttttatttttaagcatgcaaacttatgtttaacaaagaatgaaggtaaacgcaggcagctatggtgtattttaaggaaaaatggatgagtataaggaagtctaccatttactagattgtatattactttaggtaagtcactttaaggcataaacatacctattgctttatgtgtaaaatgagaatatttgtgaagattgaaatgggtatgttctttaaaatatcataggagccggtactttgtagttatatatgataaatgctaggatgtgacttaatatagaattaaattgacactcatgattcatgtcactcttacatttaccctcttataactcaagtgattcccagaagaggggtacacctcagggtactacctgccccccaacaccaggtggcttcatgaaaattcttgggactaaattatattatcaagaagtccaagagaatgctttagctggaaaaagtggggtggtggggagaaggttggggagagggaagtaggagagagagagaaagaaggacagagaaattggaaaaaaaaaagtgtgaagaaaaaaaaaattaccctgtggttagtttctactcactttaagaaagtgaaggatttactctaggaagtggtaacaaagggtgtgctcactttgtgaaaactggtcaagctggacatttaagatgtgtgaactttttttggatatatattatgcctcaattaaaaaagctgactttaaatgtgtctttcaaaaaagaactaaaagaacattccatttctagctctgagcaaagaaaaaaattaaatcaaaaagacctataaatataccacttgatcaaagtgtacttataggaactctggtgaaaagaagccagaattccaagtgggagagacctagattcaaatctagctctgttggctgaccgtgggcaagctgacattcctgagccttggtttttctcttctgtataatggagtaaagagtaacttccttcaagaggcacgtaggtaccaacaagtattattcccttccccattcctactctgctctgaaaaatcatcaaggtcagagtccacaccaagtcctgttgttttaatatggtgcctggcacatggggggcagcttgataaaactttgtagaagggggaggcggaggttgcagtgacctgaaatcgtaccactgcactccagcctggtgacagagcgagactgtctcaaaaaaaccaaaacaggccaggcgtggtggctcacgcctgtaatcccagcactttgggaggccgaggcgggtggatcacgaggtcaggagatcgagatcatcctggctaacacggtgaaagcccgtctgtactaaaaacacaaaaaattagccgggcgtggtggcgggcgcctgcagtcccagctactcgggaggctgaggcaggacaatggcgtgaacccgggaggcggagcttgcagtgagccgagatcgcgccactgcagtccaacctgggagaagagcgagactccgtctcaaaaaaacaaaacaaaaaacactttgtggaatgaaagaccagatttttaccttctagggacctataatctcgaacggagtcagaagaaaaagaccatgaaaaaaatccatcacttccaagcccctccgcttgctgatggctcccatttctcccaatcacaaataatctctcccaacaggctgtggtactgagatttctttaaaaaggctacacttcctgctatttgcttttgcttacataaaaccaactctgcttcctcattctttagtatccctgatttgcatgactcttggcttggtattctatccctcgtatttcttacagcagttgtttgaccattcctcaccattcaaggtcttatttcacttaacactttaactttgaacatgtgttactttcacagcatctctcacaaggcaaatgctcaaatttaattttgattgatttaattcttggaacacaagttcggaacccatctaaatactagcttatgttaagtctctacccaactagtttcatgtaaggagaatatacaaaccaggaatagcaataatgataataagactgatgcctgtgacagactaaagtaatagatttatttcccattcaatttaggaacccttagaattcttctaacacagcagtccaggaagccactaccaatcaatctaagttgccatcagttgaaatctattagtcattcccaggaataaatatcctccagtatgacagctctccaacaccttatgacctcagaaaatgtatcccaaatctgtcttaacacatgcaatgtttcctacgaaattccttaaagcacagaattcataccctgtatcttaaacttctaacacacaactagtatactcaaaaccgaaagatgatgtacatcatgaacacttgaaaaattcacgaattaaaaatgtcttacagggaaagcagttgtctccttgggaaagaatggtgtatggtttacacctattttaaggagaatgatggtggcatgagcaggtgtcagatctcagagcagaaggcagaggtcttgtcatacaggtcttactccaccccacaaaccccatccaatattgcttgactaatttggaatggctattactcaacatttggagaatcagaattccaagcagagaaagcaaacaagaaaaaaggaacagtttgctgtagcatatctccctcaccccacgaaattaagatggcccaaaccatggctgaccatgcacattcacttacatacagccctgacttctctataaaggatgtagctttcctcaaggtatcccttcttccttttctccatcccccaaacaattctcagatcaaacaacaaagctgcctctgcaaagtctactaatatcctgattattctccaaacataaaaaggtgaaaatgaattgttagtcttttaataacgaatgcaatcagtccatctaagagtttagcaattttccctaacaacatacttctctccaccctcacccttacttttctgagctttcaaacactgtgaaacatttgctctaggtacctagcatcagagccttgcacaaagggttggagagaacaatcgacaaagcctctatctgtttcatcatgatggttccccttactaataggaagtgtgcttcctgtccatcctttgacttttgctgtcagtgggaaccctattgccttaaaataacattctgaattcacctgcttactgttgagcacgctaacactttcagtagtgacacttaaaaatggaaagttccattaattgttaataatggaaaatgagatactctgaattaggaatatgctctcactttgctgtttattatagctatcagttctgccatattatatatgaattcataaattatgctgtgagatttactctcataccacattgaacttggtaagaatctattctaggtcttcctgattaaattcacatttaaaaaaaaaattaatgggtaagtatttatccactattaggaaactctcactttttgaagcgatctataaagtctagtaatcagcctgtgagcaagttcaggtatttataagcctataaaatacacctgccacatgtgggtttttacacttgaacagtaagatggcattggctctgcaatatttttgaaaaagccaaatacctacctcttcatcacttgtaaaattaaagggcaatcgtaaacatcggatacatttctatttcttaaataggatctaaagtttaaagaaacagctttctggctcattttagccaaacattaaagtttcactaatttaggtaacattcatttggtatccaaaaatgagcataaatactgtgtgctggaaaaaaactctttaagcaaacaaatgctatcagtaatacaggattaagggggatgatatatgttccctcaaaagaattatttcccaaaactgcatttacaaagaataaatgaaacttaaaactattctgtatctcttacaaatcagtctcttaaaaactcattttacaatagggtcagacaatgataaaaacttagaactgctggtcatggtgtctcatgcctgtaatcacagcactttgggaggctgaggcaggaagatcacctgaggtcaggagttcaagaccagcctgggcaacatggtgaaaccccacctctactaaaaatacaaaaattagctaggcatggtggtgtatgcctgtagtcccagctactcaggaggctgaggcaggagaatcacttgaactcgggaggcagaggttgcagtgagccaagatcgtgtcactgcactccagcccgggcaacagagcgagacaccatctcaaaacaaaaacaaaaacaaaaaaaaccaacaaaaaacaaaaacaaaacacacacacacaaaacaacttggaactagctgggtaaagaatatagtggcctaaggaaatcgttattagccccaatttataaacaattaaattgatgacagaaagaggagcaggtggcttcttgcattcaaagtggaacaaacttgaggcttaaaaattccaggcggctgggtgcggtggttcacgcctataatccgaccgttttgggaggctgaggagggcagatcgcttgagcccaggagttcaaaaccagcctgggcaacatggtgaaacctcgaaacctcatctctactaaaaatacaaaaattagctgggcgtggttgtacgcgcctgtaatcccagctactcggaaggctgaggcaggagaattgcttgaacccaggaggcagaggttgaagtgaaccgagatcgggccgttggactccagcctggtcgacagagcgagactctgtctcaaaaaaaaaagagaaaagctgctatagatgaataacttggtgtcatggctaaaaaagaacaataattgcaacctattctaaactaagagtaagacattgagaaatgccaaatcaggcccttcagttgcaattggaaatttaaaactatgtttttcatttacaagaaagaaaattcacttctagcatgttatctttatcatcatattaggccatattgtagatgagaacactggagtttaaagagatcaaatagtatgtaataaaaggagaaccaacatcttttaaaaactgtaaatgtatgtgatcctgtttgtggaccagcagagattatgctagtttgatttagtgaactgtgtgaataatgaataaattcaaaaaatatgtatttttttgttcccatgttttttatatttatttcaagtttacaatacaagcagatttaagctgagcaagggttccttgagaaggagggcccgacatggatctgaaagctggtgctattaatagtttgaaaagaaacaaaatcatagttggatggtacatgcatttgccatcatttattgtcatcattcattgccaccatttcccagttcatttcctggaaatcctgctgcagaaaaggttgtaaattaatttttttttatttttattttttagatggagtctcgctctgtcacccagatgggagtacaatggtgcaatctcagctcactgcaacctccgcctcccaggttcaagcgattctcctgcctcagcctcccaagtagctgggattactgttgtgcactgccatgcccagctaatttttgtatttttagtagagacggggtttcaccgtgttggccaaactggccttgaactcctgacttcaagtggtccacccgtgccggcctcccaaagcgttgggattacaggcataagccaccgcaccagcattaattcttttacaagctgtccaggatgggccctaatacactatccccatgataagcataacttgcattccatttcctctaataagggtgtctccacagtggattaaatgcctcagccagatgcacaatagactagtcatcattttcacaagctccagttaaaccacacgagtaagggcataggaggtcaaagggggctgctgatgatgaagaaaccgggctgccaggaggaaggcaaataagagcaagagtgttttccactagtaggtcaccttacagatactgacatatctgtctcctggctaggcactccttcctctccaccactccaggaaagatggtccacccggtgtgggatccaaccacagcttacagacacaacaaaaacttcctgtgagagcttgagactgccgaaaacacatctagttttgctttattcttgctacttggaactacagcctgggaacagatacactgaattactgcgacagccagagagaaaatcatgaaataggaggagggaggaagaagagtcaactgggaaaagggaaaggaaattaaatgaacagagaatcaattatatgtgagcctgtctctgcttcatatgttatacaatttaagcaccaagtgtcattgtcctcatttcacatatgagttgacggaagcttagaaaagcctagcaacaggaccaaatgctttgactctactttgcaaactctttccacataatcatggcaggatccgcatgatcctgaactggagaaacaatatagtcaactaatgctctgtatgtgtctcagaaatagctttgctgctgggtgccactggtacatgcaatgtaaccacagacaggccaatgaggcctaaatctgttagatgtcaggctgcagagatggatgatgccagaaggatcaaggtgaagggcgtgaactctagagtcgagctgtccaaggctgatttctgactgcaagactcactggcaaagtgaccctgacaataacacgtgctctccaaccttcagcatcctcagctgtaaatggactaacagcacttgcctcaggtgccagtgggtgtttagcccagtgcctggcacacggcaagttctttagtgttattaagttctttgataattaaatttccccagttgtgtaattaagccaatggcaggaaaagatcataaatacagataagctccaaataaaccttggcacaagaaaaggcctcctgtctcctggtatgctgtagggtggcaggaagcatgttactctaaccatcacaaaaaagcagaggctctgataagtgattactccaaccgcaataacccaagagatgaaactccctcattctgaatggccagttccgattccctatccaatgagcaactgagtctaaatcccatcaatgaagcctacaaaagggacaaaagtcagcaaccaacatcacagcccactcaagctcagagagctgccctgctcaccaagagaaggcaagtcaagagctaagggcaaatggggaaccctttgagactggcctcagaaagaaggccaacggtggacctaaatttcacatttctcaaacacttattctgcgagcttgtaaaaagcagtctcttcaacacctgggtcttctgagctcagcaaaaagtgccaggttcgaggatacccagaattctccctcatctttcactttgaactgagctggcctgctgcaaatattgtttcaatatcacatcatgacactttattctagtacttagcttgatgccttctgcagagcaagcactcagtaaatatttgttgattacaccaacagaattattttatttttaaaaaacactgacacaatctgcaatatgaatcttctttctcacgggagctatgtttagttatttttaggatatccctgcagaaatgcacaaaaagagggagaaaagaagaaaaagaggaaaaggaagaagagtagaagagagagagaggataagagagctaatttttaggcacctgaagaagaagaagaaaaaaagactattgaagacaaggtgttagaaatgaggcacgatggctctgagatcaaaaatggcaccatattgcaagagggagagagagacccaaattaacatcctttccttgcaaatggttctgtcctatagcagagtatactaaagaatactgcttagaagtcctaacagagctagatcttgccatcattagagattgcctcaacaattttcaagccctgagatttaccctttacaattttctattttaggacctaaggggcaggtaggagaactttcactttttactttatcccttttcttattcctttatttatttattacaatgggtaggtaccaatttagtatttaaaaactaattatctcccttcagaactagaagagatcttgaaaataattaatttcagtggtcttctttgttggagagaaaaccatgggcttacaagagatcaagctgagtctgggatgcaggcttcctaacttgggggccagtgttcattcagcttcctggatcacatcaacagtctcagagcactgggtggcagaggccaaggaggagcgacaaagtgtgatgagtttattctggctagagtggatcctgatcccctaatagtgaatcatctacaattttacaacatgaccaccagaaagcatatacatataatgtcccaaagtcaagagcaatctgaagaaaaatttcttcccacaatttatgaattatttctcataacagtagggaggctatgctggaaaccatgagctaggttccaggtaattggtgcataagaactaaataagacaaggataaatttatgtgatagagctaacaatgggacaactgagcatttcttaaaatgtggccgcgcacagtggctcatgcctataatcccagcactttgggaggctgagacaggtggatcactgaaggtcaggagttcgagaccagcctggacaacatgttaaaaccctgtctctaataaaaatacaaaaattagctgggtggtcgcgtgtacctgtaatttcagctacttggaaggctgaggcaggagaatcgcttgaacccgggaggtggaggttgcagtgagcaaagactgcaccactacccccaagcctgggtgacagaaagagactccattttttttaaaaggtgtcagacagtccaagagaacacaatgcatgccagggttctggttcccctagcttccctgtccccttcgctagaaattaacatcaaaccacagaaaatgcctcagtaactacttcttcagctcatctccagtctaggggccccagtatatagtggcagttcagggtatctccttctgtttttcagacacttcaactgttccaaagacctgggcaaaatctcccttttttaaaccatgtggagaatcttctttcctattgtcattagttaagtataaaatcaaaagcagagactctctttaaccagtacagcctcttttccagagaatgccaaggagacgctaacccagtttggtcctgagctggtttccatctccatgattcatgccataaatgtcatcctcagcaaagagaggatctggtggcctgctactctcagcttcttactctgggagggaagtaggaagtggtaaggataattccttggatttacttcatcaatgactctataataagtaataagggtagaacacattacaattcacaaaataattccacaaacattatctcacttgcttttaataacaacattggaagaatgaacaactcattccagtgaggaatttaagactcagaggttaaataaagctgaatatgggaaagattaggcaatttgcccacctcaggacttgaactttggtgggcaggctttagctctaaagttcttctataccaaagctgtgtcaacattaaagctgggactggacttccaatctgaggacccagaagagtcagcatatcctacttaacttctaagggtagggtggcggggtatgatttctttattttgaactataatttatatggtgtctcctagaagtttatggcccatacaggtatcttccactgttgcgggaagtcaaggaccccgaacagagggaccggctggagcctcggcagaggaacataaattgtgaagatttcattttaatatggacatttatcagttcccaaataatacttttataatttcttacacttgtcttactttaatctcttaatcctgttatcttcgtaagctgaggatgtacgtcaggaccactgtgataattgtgttaacggtataaattgattgtaaaacgtgtgtttgaacaatatgaaattagtacaccttgaaaaagaacagaataacagtgatttttagggaacaagggaagacaaccataaggtctgactgcctgcggggttgggcaaaaagagccatatttttctctttgcagagagcctataaatggacgtgcgagtaggaaagatatcactgaattctcttcctagcaaggaatattaatattaatgccctgggaaaggaatgcattcctagggggaggtctataaacggccgctctgggaatgtctatcttatgcggttgagataagaactgagatatgccctggtctctggcagtaccctcagacttactagggtggggaaaaactctgccctgataaatttgtggtcagaccggttctctactctcgaaccctgttttctgttgtttaagatgtttatcaagacaatacgtgcaccgctgaacatagacccttatcagtagttctgcttttaccctttgccttgtgctcagtagttctgcttttgccctttgtcctgttccctcagaagcatgtgatctttattagatccttattagtagttctgctttttgccctttgaagcatgtgatctttgtacctactccctgttcttacaccctctccccttttgaaacccttaatgaaaaacttgctggtttgaggctcaggtgggcatcacggtcctaccaatatgtgatgtcacccccagcagcccagctgtaaaattcctctctttgtactctttctctttatttctcagccggccaacacttttggaagatagaaagaatctacattgaaatattgggggcgggttcccctgatattccactaagaaactatttcaatatggttttattatgctgactaattattacaagttgatcagtcttcttctgctgatattgtttgagtggaataattctgcatagaatgttcaaatttttgttttttgcttaatagatataaccatatatatatatatatatacctgaataggcattcatttagatctccctcattcttctaaaatcctgcctaatattctaccaaatggatgtaccacaatgcttttaatcaatctcctactgatagaaatttaagttatttcaaatttttcattcttataaaaaaatcaaaatatttatttcaacaaccaaataacaaacaatatatcaaatcactatttgaggtcaggcacggtggcttatgcctgtaatcccagcactttgggagaccaaggcagacagatcacctgaggtgaggagttcgagaccagcctaaccaacatggcaaaaccctgtctctgctaaaaatacagaaagttagccgggcatggtggcgcatgcctgtggtcccagctactcaggaggctgaggcacgagactctcttaaacccaagaggcggaggttacagtgagccaagatcatgccactgcattccagcgtgggtgacagagcgagactctgtctcaaacaaaacaaaacaaaacaaaacaaaacaaaacaaaacaaaagtcactctttgtgataaagtctgaaatattctgttttggctgaatgtaaaaacttaaaactataaagcagaggtgctgtgggctctgtcaaagtcagttttatcacaggaaaccgttgtcttttgtggatttctttgatagaaactgctttttttggcatttcacttcttttatagaaaaaatgctattctgttgggactgaatgatactatatcttgacacagaaaagttatttatacataaattacagtaactttacccatgttaatgaagctgtcatcctcttgtgtgatttactgcaatcttgtaatagaaaagtttcatttccttgacacctgggtggtaatgggaccgataattccatgctgcaaatgtttcctcctctcttctaccagaggtgtgttaaaatctagagtgcatttttaggtcagagtaattctgataccagtctccagggcccagagcaccagcgcagacacacacaggtgtgcgcacccacacagtcacatccattatccagaaaacccagcaagacctcctctttcttcaagagatttatagttctcaggatataggcctgtacttgttctgcaactgagtttgagaatagcaacatatacgtaatgagaaagaataatagaaggcattaaaaaatgactgggaattaaagttggaaaaggcagtttaacagagagttcagatttcagtttaaagtttaacaatactgtttaaggatgggtgcagtgactcacacctgtaatcccagcactttgggacaccaaggcaggaggatcacttgaggtgaggagtttgagactagtctggccaacatggtgaaaccccgtctctactaaaaatagaaaaattagctgggtgtggtggcctgtaatcccagctactcgggagactgaggcacgagaatcacttgaatccagaaggcagaggttgccttaagccaagatagcaccactgcactccagcctgggggatagagtgagactctgtctcaaaaagtaataataataaaataaaaaataaagtttaacaataccgtttaagaaaaagctacttcagaaggtaatagataagaagaaacatataggtaattgaagacagcctatcacaatcaatttttctctctagatcttaccaaaattgtaatatcagtaataatactgatagaaagaaaattaaaggagatgagaaaaaggattttcataagctaccacaatgtaaagatcttttcataaatagcttcttacaactacagactttttaaaaaaccttcatcctggctgggcgctgtggctcacacctgtaatcttggcactctgggaggccgaggcgggcggatcatttgaggtcagaagttagagactagcttggcggacatggcttaatcccgtctctaccaaaaatagccaggcgtagtggtgcgtgcctgtaatcccagctacttgggaggctgaggcaagagaatcacttgaacccaggaggtggaggttgcagtgagctgagattgtgccactgcactccagcctggacgacagagtgagacgccatctcaaaaaataaaaataaaaaaccttcatcctaacacatcctaacacgtctgctcctttaatattttcattgataatatgctttcgtaaaattctcaccagcatttttgaggtgcaatattcatttagctaagcgaatggtttcacctcaaagatgcaaagttctggctggacctagtatgatcagcacactcacactttctgatgtgcgtatggtaccactgccttttctgtctgtcagtagaatggtctccactgtagagaagacagaacagcagatgaaggtgtgcctggacaagcaaccacaggttccatcccagaggtagctggtgggtggcgctgttagtccacaggacctatattccttttctgcttgtcactcattcaggcactgctgaccaccactcactaacctggcattcactgaatgcctaacatgtgccttgggtggtatgtgttacgttccagaaatacacagacaaccaaaacttggtcagcacactgttaggcacctgacagcaaggatcctgacataatgaacactaatgtggggagtcctgtgccttttccagggataagcctccatttagcacagctatctgccaaatgacttccttgctgagcttcaaagcctcccgtaatgcagctttaaacagcacgagatgctgtaacaaaagagacgtcactacactgaatgtgaagttggtatttcctatttcccagcaatgttacttcataggatttctattacattcaactttctagaatttcactgcatgttctttcactcaacaatagtgagcttctgcgctgcacccaacacagtgccaggtcctgtgagtatcattaggaatattatagattctgccccaaaggagctccacagatcacctttagttggaaataaggctcaatgtagacagtaacaaccatgctgcacagatatcatgaatgtgctagtctcccaagatggcctcatcaattcctcccttccctgattgcatttgctgcttcttccttccagaagtaagtctatttcccctcctcttgaatctaggctggctttgtgttttgctctgaccagcagaatgctgcagaggtgacactgtgtctgttttaagtgtggcccataagtggcctgaaacttctgcttttgctctttaggaatctgcctcttgggacccagctgccacactgtaaggaagtccagagcgggcgtgagaggctgcatggaggcgaactgagcgtcccactgagctaccagccgaatgcagccacaggagtgaccccagcagatgccacatggaatggaaaaacaaccaacccagtcaaggcactggatctcgaggaactataaaagttgttttaaggcactattttgcagatgtcttattacatatgagaatatccactgacatgatgtgttagtcacactgttggaggagaatatgagaaatatccatggatcagttcccctaagtgaaccctctaatattcctgaggcaaaaaaaaaatctactgttagcagaattcaatacagcttacctctccaaaaatctactgttagcagaattcaatacagcttacctctcctgtggagacctttgttttagcctcacacatccttggagaaaaaaagaattcaactttacagaaaaatagcaaaataggagaactcttcttaactttcatgctcattaaagtgaaaattaattaagaagacatctgaggtgtttttttttttggagacaaggtgtcattttgtcacccaggctggagtggtggtgtgatcacatcccactgtagcctcgaactcctgggctcaagtgatcctcccacctcagcctccagaacagctggcactacaggcattacaccaccacaccaggctatttttgttgttgtttttggtagagatggggtctccctgtgttgcccaggctggtctcaaactcccaggctcaagcagtcctcccaccttgacctcccaaaatgcaggaattacagccatgagccaccacgcttggccaacatctgagttaaaacttttttttttttttttgagacaaggttttgctcagttgctgaggatggagtgcagtggtgcaaacacggctaactgcagcttcaaactcctgggctcaagcaatcatcccgcctcaccctcccaagtagctaggaccacaggcacgtgctactatatttggctaatttttaaaatttctgtagagatgggatcttgccatgttgtccaagctggtcttaactcctgggttcaagtgatccttccacttcagcctcccaaagtgctgcaattaaagccatgagctaccacacctgaccaagagctaaccattaaataaatattcctggtttaaattccaaattatatgaaatgaatcaactatattttatttagaaggtcagataatacattacaaacagtgaatgtagattttatgtatttactatgtgttaagaagaattttaaatcctgatttctttttctcgggtttaactggaagcaagagcacgccacatcatgttgatagttgatatggtggagctgatgagaaggaacaggggtttgaggttaaagagagaacaaagagagaggcaacagaaatgggaaaattcaatttttattttattttatttttttgagacagagtctcaatctgtcacccaggctggaatgcagtgacgcgatctcggctcactgcaacctccacctcccaggttcaggcgattctcttgcctcagcctcccgagtagctgggattacaggtatatggcaccacaccagctgatttttgtatttttagtagagacggggtttcaccatattggccaggctggtctcgaactcctgaactcaggtgatccacccgcctcggcctccaagtgctgggattacgggcatgagccaccgcacctggcccaatttttaaattttttaacagtatctgtagtgtgacttcaacagtaaaatcacttaccaataagtaaaacattcctaaatccctcctgtgttctttccctgcattatctcctaagcacgggcaacattttcatttaacaaagcaaacaccacagaaaataatcatcatgcaaactctcctgggaaggaagagggactgctgctttcttactagttattgcaatcagtgtttacagcatgcctttacacgaccaatacgccttacagtcgctcattagttactctttccaaattcctggagaagtgggtcagcattatcatcttcgggattactttagggaggaggaagctgaccatccctgtgaagataacttagccacaattgtgctgggtggaagttgaccacccctgtgaagataacttagccacaatcgtgctgggataacaggagtggctgcttcagaacagagccttgggtgccaccagtttgctcctccaacacatcatcaagcaggactccaccaccagcatggatttacaagactcccctcgtccctccctaaacatacaggatgtacatttggaacaagtttgtatcttcaaatttgtaaaatacaccatcacaggtcatcctttaatgttttgcatcgaaagggtggtttttatattcctttctctgtttcaaaaatgcattacagcttacaaagtaacatcctggtgaggctgcatttcctgagagtaatgactaataaaggctttgggcaaagcctcgcctgcaactcctctagccagcattattaacaacaagggcacagcttttcaagaggccccgctacttccatcataaatgctaacaggtgctccttttatctggggatcctcaagcaccttacagatactactcattaagtctcatgaggcctctaggagacagacccagtgagacacataaaagggaatcctgtcactcatcaaagacagaaaacagcaaccagctcatatacttgatagagcaacaacaattttactgaaggaaacattagaaacattgcctagaaatctctaacctagatgctttcttctgagtctcattcactcattggcaaaatgagaataataacactagttcagacaacttcatgaggttagagagtgcagatcaaatgaagggggcagagggaaaggggctgagtaaactctgatgtccatacagataaaaggcattatttccatgatctaaatcaaactgagatttgaggcagaaaatgccatctctaaatcttgtgcctaatacagggagtcttttttccaaacagcttgggcattatttatacaaatgcaaattctatttctatgtctatgatcacattcctatagggtataggagaagatgaaggaagagaaaagcaaaatgagagtcaaagcacatagacacaattatccttgattgtaatgtttgcatatattcaacattcaaaacattttttcatctgcctggaaaacattcatgatagaagaaatagaactgtacagactctgcaatggattatgtcgctttattcagatttgttttctttttttttttttaactccagttacaaaaattacagctttaaaagtttcactgaaattcccataaaactgcaggaattcaactgccaactggatttgctgctgcaggagataatccactttggttcagaggtggccccttttgcttgaaaggaaaccaggaccttcctgaaactgtcatgggctatctaaaccacaccagcccttagaactcacactcccaatttctaaattcccaagtgtctcccttcaaaaacgagaaagggggtacctccatgtatttaaagaggtcgattaattttatctcccgaggtctaagtaaacaaacaaacaaacaaacaaaaaccctggcaatttgctttaaaacatacagagtactttcccaaggagttgacaatgtggtgagaaacaatcagaagccagaactcaaaagaacagaggggcaagttgttgcgttactagagtaggttggtagccaagttttcgtttcatttagaaactttataaagaagtttccgtgaacatgaaagttatgacagtcatctgtcacagtcagtaaccgatccacctttcttaggattgaggaattctccattgtgagtgtctgagagaggcatggtttgtctctcattatagaaggagaacaagagagaagctggcttctctcttcccttgccttgttagggatataaatggaaactaaattagccaatcagatgcagcatttcaatgtccagccaaagcactgcccaacatccagtgtatctcggctgtctggacagggctcaggcagcagctccagcccagtcctaaccattatgtctatactgcgtaccgtccaatattccttaataacttctttttctggttgagttaaccagtttccattgctttctgcaaagagcccacactggactaatcatgggctaaagaggcaaccctttctaatgctagtactgcctggatcctgagcaattgtccatgggcagttcattttatagatataagaagcaggaggatgcaagaggaaagtgatttagcaaaagtcatttagcccaaaatttaaaactgccaggcacggtggcttgtgcctgtaatcccagcactttgggaggccgaggtgggtggatcacttgaggtcaggagttcgagaccagcctcgccaacatggtgaaaccccgtctttactaaaaatacaaaaattagctgggcgtggtggtgggtccctgtaatccccaggtagctggctgaggcagggaatcacttgaacctgggaggtggaggttgcagtgagctgagattgtaccactgcactccagcctgggcaacagagactctgtttcaaaaacacaaaaagaaggaaggaaaaaggacagtgagcagggggatgtgggtggctcgaggagactggaggaagaaaagggctttgaattctcagcatgtttacttgacttaaagaagcggctgggcacggtggctcacacctgtaatcccagcaatttgggaggccaaggcgggcagatcacgaggtcaggagatcgagaccatcctggctaacacggtgaaaccccatctctactaaaaaaaaaaaaaatacaaaaaattagccaggcatggtggcggttgcctgtagtcccagctactcgggaggctgaggcaggagaatggtgtgaacccgggaggtggagctggcagtaagccgagatcgtgccactgcactccagctggggtgacagggcgagactctgtctcaaaaaaaaaaaaaaagaagcaacacggagtataaagatgacccaactttccactcatccccaaagcgtgactggaataacactctctgaatcagcacttgctgcatggagcaccacattgagaacaattccaaagctgcatcttggctcagtgggaatgagttcaccaatcaattagtgttatgggtctagtaagagtgagaaggaaaacacagagacatgtattcaccatcgttgatatactgagaataactcccagactaagagttaaaataggtgtgttctggccttagctctgtctggctagtagactcttggattagaggaattcgtatcacgtgggagcatgctagaactggagaatttccttagatatactgaatcacaatctgcattttaagaaaataactgggtgattcatatggccaactctaaaactgcctgatttgggaaaattcccttctctgtccccactgtactagggaaatatttactgactgcccaccatatgtatggtgctgggccaggactattagaatatacaaggaattgatcaatctggtctagagttcacatacaattaagagatttactttatatgtcatcagctaccctccagagtagtactcaaggggttttatttttggctgctataaaagccaacgggaacaatgctaaatgaatgggaatccctttggattgcactgctaacaaaacctaaaagaaaatgatctgtttacacctttatgctacatctttccaaaccttctgagtacaaaagcaatcagcagttgcctgtaattactgtgtcatgtggatactactgacctcacattgttctccttggttacatcatcgtgcgacttcagagaaaaataattatcactacaggccaaaacaggtaaataggaaattcagaggaacagtgctttctacactacagcagacctggagggcagaaaagcaagaggaaggagacatctggtccagtatagtttggaaaggcataaaacctaaccaagttttataaagattaggcaaacgagcatcactttattccccatattggagtctgccagttcaaaaggaatcttatattctagatgagttattagtagtgtatataggcaaatgcctcttgaaatgtatacatgaatgatacaattttgatatgtaatgggctccctgtagaatgccccaaaccctgcaacctatttctctaacaacctaaaattcacaggtatgtgttctgttaagtttggttctaaaatgacttttattataaatttagtgacatgtttccatggagaaaaaaaattccaaaacatagaactgtaattttttaggtaaaaagaaaccacgataatgctatcccaatcccaatcccgcagattctaaagtgggtatctttaggctggaaatgggaatgcatttgaagtgctttcataaatatggtgtcactgtccctcacctggattatattctatggctttcctcatatgacaggaaaaggctctaagatctgtgacaacaggagctgtgtctctcttattcatctctcttttcacagcatttagtatggtctctggcacacacataattgttgaagaatgagtgaatcaatgcaaccacctcaaaaaaaaaaaacaaacctttacggttattacaggaggaaatttggcagcatatttcaaagataaagcagaagtacatggagaaaagtatcttgctctcaaaaagcctacagagaaagagtgctatcacctcacagcacttctaagccttttgcagttatggaagccatatgaccccaggtttatgagaacagatctgaagtagttttgacataaaaacaagaaattggccaggtgtggtggctcacacctgtaatcctagcaccttgggaagcaaaggtagggggatcacttgagcccaggaattcaagactagcctaagtaacacagggataccctgtctctacaaaaaaaaaaaaaaaaaagaaagaaagaaaaaaaaaaagaaaattagccatgtgtggtggcacacacctgtagtcccagctactctggaggctgaggtgggaggatcacttgagcccaggaggttgaggctgcggtgaaccaagattgtgccactgcactccagtctgggcaacagagagagaccttgtctcaaaaacaaatgaacaaacaaaaaaacaagaaattgttttcatccctcatatcctgcaatagccgtttcgcatgttatctcttttggcttctcaattttaaagttaaggaaaccaagacccaaagggttaagcaatttgcctctagtctaaaatcaagtccatagaagagaccgcacttggcctaagatctgctagccgctagcatggtgatgtgtatgccctgagaagaactgtgatcttcataaagaacataaagtctataatcaaagtaaaatcccaatgcaagtgtcatggggaactttgatattattctctagatcatttgagtcataaacttctttgcttctctatccttcctctcctcttgtattcaaaatattttagacagatgtattggccctgaaatggatctaagctgaccattgctttacagcctataatcctagggattaaaactcgagtgagttccttttaagacagaccaggtaaaaccccagagagggcctcttccatgtccatctaactgattgctcttcagataaatttctcccactttttaaaaaagccattttttctttcaggctgaatcactaatgcagggagtcatggctagaagtgggatgcagcggaggtgcccaagaactgaatccacaaaaagtcattaattgccaaaatgactgagcaaattcaaatgacccaaatgcattcgctcgtaagggcaatttgcttctaggaaactggaaggagagaggggtcactgaagccgaagccacatagcggatgacaaacaggataaggaaaagcaagaaggcagacagttcaactctgtcagcatcaaagattcagacccaacaaaaacgcttatataaaaggctttgcctataaacatgtttatttaccttctatttggatggatttctaaattttcctggagagtccaggttattgaaaataactgcactgccagtgtctcttggtttaaaggtctgctaaaaattctacaaaaaaactagcaacaaaagccttgaatgtctcaacatatttcatccgtctcatctcagaggtttcaccaacacccaaatgtccagctgtttacatgtgcaatttatgactccttcagtgtgtcgtcctcttttgggttctctgctgtgtgggataggcacagtaataactgtcccctacataagaaaaccatttatttaaaatatcacacaggataaaggcagagttacaaacactgcaagtctgtcaattccactcactgatttttcttggctctccccagccggctatcatctttcatgaagtgccaactagcaacaaaaatactgacttgtgttacatcaaaaaggttttttggaaaaaaaaagaaaaaaggcagaaactcactgtcttagtctttttacactgcataggcctagttttatttcagagcatttcatccaatggtccatctctgttcccacaaacaccttattaagtactattttggcttctttaagctagattcctctgggggaaaaaaaaaaaatcacaatttctccttgtgataaatgactattacattcactgcatttaacaaacacatcatgtcagtagtctagctgaggggaaaatcacaaattaggtaagctgtagtccttatctgaagggattcagactctcaaaagagaagatgggcacaggggtactgtcacttaaaataataatcttagtcataacagcaaaaataataacacattgtgagacagtaacataccactcaatctgcttacaaaatagaaagatacttctgcctttaatcagatccatttacaggtagggctgactttgtttgcctgtgacccatacggtgacactagagccctgtcttctcagaagggtgccatgcttcgtttaatgctctgctgtgtcttgaaatcctgaacaatttttgaacaaaaggtccacattttaattttgtgctagatcctgtaaattggtagttggtcctgcttgcaggctaaaacctgcaaaccttaatctcactggcttaggaacaccttcttttcatattagctcccatggttaaatgagaaaccttggaggcagaatagtgaatgttatttgtccagtacagcctccagttgagatggcaacttcctccttattgaacaggcctgctgtgaatgatactgttgatcttcactggatggcataccctttatcatacatatcttagacctttggagttgatagagaacatctaggccaatggactcattttgcaggtgaagagccaggacatttgggtgactcaccagagaatgaacagttagttcctgacaaagagggtaaaaccaaggccattgctctttcaaccactagaaattctatttgaatgagtgtgatgaactagggtgggagtctgtctgcccagcctattaccttaagtaggcacctgtccacagtgcctggcatgtaacaaatatttggttgaatgcaggcatgtacatatgcacgagcaaatacaaaaggtaataaaacaacaaattatgtcccactaggcacagaatcttaaactttttagttactagtttccttaacaagcttcaaactttcttaaaatcttcaatagtttttatctttcaaggaaagaatgctgttctgataaaaatactaaacagagaatgcaaaataattacgatgatgataatcacagcaataacatttacctggaacatagcaattgaaggaggctgagagatcttgcttgcaactggttcagatatcacatctaataatttccactggatgtgatatctgaagcaatgactggaaaagtgtatgtgcaaagcctgtgggttctcttgacatgtcagtcaatattaaaaaaaaaaaagatgaaaccactacactacagagtaggatttttttacttttagagaaaagtaaaattaaaatcatttccttacggagcaagtacttacgacaccgatgaaaaagggcatgaaaaagccaaggaccttgagttctgtgcccactaaaacaaacaacccaaaagcccacggccaaatagaaaacagaaataattgagcccaggttgattaaatagcttcccagatagtggatcatttgcattaagtctgaatcctttctcatccttagtttcttcaattggggtgataatgaagacacacatctcctaagttgctggaaagagcaagtgagttcatacatgtacagtgcatggaagagtgctatatatacagtaagtactcaataagtattttctgtctatgggctaagcctgaccaagcagtgcctgcaacactgagctcaaggaagaaatactccaaggaaggtaaagaaacgcacaggtagtagagaaactaacatgagctcaaaaaagatgaaaagatgatccacaggcagaaggctaaatcacaggaagtgtcagctctgagtgcttccctcttcctcctcactctggcacaaatatgatacgagcacttcctccctgctcttcaatgtgaaagacatcagagacacaacagaaaacaaaagacatcatccgtccgttgccatgctcacagactagccagaaaggcagttattagacatggagtaggaacttaatatttttgaatgaatgaaccaatgaaaattagtgccctcctcctccaaaaccaaagaatcataagcaggctcaatagatttttctagtaagtcatcatgacagattccccattactgcttctattagggacataggggatgagactgaaggagtatgccaaaggtgaagatcttcccagaaattcctaactataaagctttcacagccggattaacatgcttctctcagcatggatatctatccgtatatgggtatgtatctcaatatgggcatctatctgtaatgtgtctcatagaaaagtgtaagagcagccaggcgtggtgcctcacacctgtaatcgcagcactttgggaggccaaggcaggcgtatcacctgaggtaaggagtttgagaccaccctggccaacacagtgaaaccccatctctactaaaaacacaaaaattagctgggcatggtggcagatgcctgtaatcccagctacttgggaggctgaggcagacttgcttgaacctgggaggcggaggttgcagcaagccaagatcgcacattgcactgcagcctgggcaacagagagagactccatctcaaaaaaaaaaaaataaagacagaagagaagaggaagagtttgccaaatgggtgatcttgtcattgatcaagaagtgcaagactacctatcactcattgtcatcccaaccagtgggaccagtcaacatctttcttgagatattcacacctcaagaggaagaaatgaagtaccaaatgaaatgtggggagcggaagggtggagaatgacaagtgtcagccatcatttctccccaggctatgaagacaggcttaagcaactaaatgcaaattaattactttattcatatatcaaaaaaaaaaataggacatttacacacacaagcaagactcaaagacataaagacttctacagttggaagattatagacttatctctaaatatccacatctggtcaacccccatccccaaaaaaaccttttctaaaaatggatcagtgctagagtgatgtgggagaggagaagagagtgtgatggtgaagtgtccatcaagttttaaatacatatttctatatttatataagtaacatgacaagttgacaaagtcctttccaacaggcagacagatttgtcagaggtgtttgaaccacagtgactccatcttgagtaggggctgggtaaaataaggcagagacctactaggaggctgcattcccggaaggttagttgtgtttagtcatagggcgagataggagatcagcaggatacatgtcacaaagaccttgctgataaaacagcatgcggtaaagatgccagccaaatcccaccaaaaccaagatggcaacaaaggtgacctctagtcatcctcactgctcaattatatgctaattgtattgcattagcatgctaaaagacacttccaccaatgccatgacagtttacagatgccatggcaatgccaagacgttatcttatatggcctaaaaaggggaagaatcctcagttccaggaattgcccacccatttcctggaaaactcatgaataatccaccctttgtttaacacataatcaagaaataaccataaaaataggcaatcaacagtcctcggggctgccctgcctttggaaagccattctttattcctttactttcctaataaacttgctttgactttattctatggagtcgccctgaattctttctctcacaagatccaagaactctcacttggcgtctagatggaggcccctttccagacatggatacatttcctgtatatactcacacagacatacatatgcccttcaaaggaggcatgcttagaaataaaaataaataaataaataactgatatattagcaattgataaatctttataaattataaactacaatgatatatatattttgtgtggggcgggggtgtgggaggtctatgagagagggagggaaggaggaagagaaggagatggaaaagggggaggtgggaataagagagggggaagccagacacctaggcgtggttattggctacacattgagctggctgttttaccaaggttatcagtctttcagagatcaataataaaatgatatgaagagaacgaggatacctattttcaaaaatatgcttccaaagatgtctgttgccggacatgctggcagagaatagctgcatgatgcaaaattccattactttatcatatccatctatgttttaggtatatttctttaccaggacatcatagccttaaaagtcactcaaggtttctattgcagctaaggtcagaatcctaaagttgtgcattcactccctctgggtcctagatttttgatcacttgaaatgttctgtttgcaagtcgaagcagtgagtctcaagcttaagtaattatggaccatatatgaagaagaaaatgcccacgcggaaaataagtcaagtgaatgcatttactttatttttattgaaatgtaacttattatgcacaaatacaaattttttaaaacaaaagcaatttaaattatttcaattcgaaattacgtagttttactaaaactcaattgtccatattgaattttgcagtagaaaaatagagtctcaggccaagttatatatttgaggtttttgggggggtgctttaacttctaaatgttagagtgtctatttacataagcatgaaaactattgaacagaaaagttattaggaacttcaaagctttgcttgcaggttaaggataatcagaattcaacttaaccaaatgctggctggggagcaatcccttcatactgattttacagatttacctggtaaatctgaaaagatattttgttcacagaagactagttttgaggaattaaaaactgcattaaatggcatctaaaccaattactgagtctgggggcaggaagggaaatgctataccatacaactgctaagactacttctaacaaatgtaggaggctgttacgtaaaaatgggaatcccactcaaaacataaacatagtactgcccgctcaccagggttcttgggtctgcccacacctcactgtcccacactcacttccctccacccctcttttttctattcaaatactgcaaaaatcttttggatttcctgagccttcgttttagcacatgacaattataggaacatacctgcacagagttaagaaatccatggctttgcttagtgctagtttcatcgagatgacccagaaaatacttttatgactgttcttaatttgattataatcaaaatgaaaaatgtaaagtaaaaaagagcttggatttccatccaaggatagccaaactccagtcagtgaagcctagagctggctgccagggcagcactcagagtggctgagtaacctatccaaggacacccagagggaatgcaaacttaacgtgctcctaacatcttccccgtgctcactccatcctagccatactggcccccttctgttccttgaacaaagctctcacctgtctcagggccttgatactggctgctctctctcagtggtatgttcttccccaaacctcccaagactggctctatgctacactcacttttcgcctccaaagtctctcttgaagaggtcttctggtcttttagaaccagtcagtttctagcattcatggaactatcttaaatctctgccatagctcttatcactctcagatgttctgctgggtatttttttttttttttttttggtttatttgagatggagtcttgctctgtcgcccaggctggagtgcagtggcgccatttcagctcactgcaacctccacctctcgggttcaagcaattctcctgtctcagcctcctgagtagctggattacaggcgcacaccatcacgcccagctaatttttgtatttttagtagaaacggggtttcaccatgttaggcaggctgttctccaaatcgtgacctcaagggatccaccggccttggcctcccaaaatgttgggattacaggcactctcagatgttttaatctatgtctgaaagtgatgagagctatggcagagatttgattggcaagtttatttattcactgtctactagaatataagcaccgtgagtactgggaccttcttggtctcacttactgctgcgtcccatgcacctaggcaagtctggcacattataaaccatcaataaacatttgtttaatgaacaaatgaaggaagaaacaggaggcacggggcacagaaagatgatacaactgcccctctatttaatccagtccactacccttactctgaatgcttcacatcacattgctcgtcttaattgttttcaaacaaacaagtccagacgcctgctcacaggggtccctagtgggctcctgctgtccagccttgctccacgtgaagatgccctcttcacagagcaatggatccccctctcctggttccagctctaggagtctcaccacaatcccaccagcaaaacctctatctcctgcctcaaattctggacacaggatatctctcccaaccacaggaacactcctgtgccttctacctcaacacgcactgcttcagcacagtgttttgaaaccctttagtctgagacacacctgtaaattttcagaacttccccattccccaccccacagatacagtaagagcagcaccaggcttgtcgggttttgttctcctccatgtgtttcccagcagcacttagcaaaaaaaagtattaaatgaaaaaaaaaaatggactgtttcttgctttcaggaacagcatggacgaaggatccagggaggcagagggatagaatggcccatagctggctttataagagaagggggaagcaggcgcagtccatgcgcctctggtagagagagagggttgagtctggggagcctgcctgcatgttgcaagaggccccccagggcttccgagcagaccaggacgtggtttcccattgatgtgccctgtgtaagctcctccagaggcagttcccactggggaaattccctccaaggagttgtcacgccccctttcccttccttctcatctggataaccctctttgcttccctgtatctcttcaaagggctcctgcctttcagcttctggctagagaatgaaatctgaaatgcagccagttcacaggaagccagccagctgggtgcgcaaagaacccagaactgtttcacacctcaggctcctttcacaatgcaaatggatacctgactcaggcactgcggtacaggacagcaatgtgcacgcttcttttatgtacgtattttttttaagcacagaatctcttcttccaagaaaatggtatgcagaaactcaggatagaaaaccagttaggagcagaggttgggaatctcaaagccactccagccctttcgccctgaattgatcctacacatgcatctatcctagagaatcttaggaacttagcagaacacagcttaaacagtgtcataagaaagaaagcatgtgagctttcttatcaagacagacctggcttgaaaatccattctgttacttactaaactctcttggcctcaatgtcctccttatctctaaaatgaggacatatacatctcctaggattatggtgagaattaagtgataacggaggttaaagaggcctactacccatcctgggctctcaagaaacaacacagcagctgtagggacaggagctaatagtgtcatgtccatggtttggtttgtcatttctaaacacagacacaggcattcctccacttcccaaacccaaatccagaaaatcctggttagttatctatcactttttttttttttttttttgagacagggtcttgctgttgcccaagctggactgcagtgacatcatcatgattcactgcagcctcgacctcccaggttcacgggatcctcctgcctcagcctcccaagtggttgggaggtgtgcaccaacacgcctggtacacaggtatgcaccaacatgccaacagcaccaacagctaattcattttaaatttactttatgtagagacaggatctccctatgttgcccaggctggtctcaaactcctaggctccaacaatcctattgcctcactgcctcaacctcccaaagtgctaggattacaggtgtgagccactgtgcccagcttcctattactcctataatcttgtggcatccaaactcaactttcttaaatattccaatgcaaatatgtatttctgtaaaattattatttttattttaatttttggagctctgtaatagtctcaacacagacaatcacaggtacagagaggacctgggttgtcaatatactggaatataaacactaagggcaggtataatatttaatgaaaccaaattctataatatactgctatattcaaagctccctggtcctggtttacaaagaaggaacaccaggcagaggagaacgaatgaagtcgctttcataaaatcttgccttcatctgtagaagggtgtatggttgttcctctttctattcagtccatcagcccacaaaaagctctgcatttggaaaactggacaaattccatattcactcaagtagaatggcgatctgacttggcaacatgtttccactgaaatttgtgcaaagaaaacaaaagggaaggacattacatccatatccatgttctcctcaccaacaaaacccttgaagactggaatttccctgcctgtcttctgagcagatgaggacctgagcctattccaacagcctgtggatctatactccacataccccactgtcacagactccactagtccactggagatttctcccatcctatgcactttgtgagtcaaataaatttccattggttaagaagtgtgagtgcagctgccatttttacttgttaacttaaatatcacaataaatgaccaaattagagaaaaccaagagaatcagagagaagtcaacctagaaccctgatatcaccaaattgctgattaacttacaaacaaaatacaccaccatcaccacttgggaactgtctatcttctctatttttaggaagataagttttccttgtttaaactgtgttgaggggccaggcccggaggctcacgcttgtaatcccagcactttcggatgccaaggtgggcagatcacctgagggcaggattttgagaccagcctggccaacatagtgaaacgctgtctctactaaaaatacaaaaattagccaggcgtggtggcacgcacctgtaatcccagctacttgggaggctgaggcaggagaatcacttgaaaccgggaggtggaggttgcagtgagttgagatcatgccactgcactccagcctgggcaacagagtgagactccatctcaaaaaataaataaataaacaaacaaacaaataaataaataaataactatgttgagttggaatgtcttctagatgtggcccagagcattctgattaacccattcaacacagcacctgccacacaggagatggaaaacaccatcactgtacctattatgacttcttccatctctacatcccttcgctccctccattattacttcccctgcccaatatcccctcaaaacacaccatttagctccttcaaataccttttttagatttatgcttgtttggcatattttcccagagtggctgtatgtatttaatatgattaacagctttagtcattaaacagcatttctttaagaggattgcacgagattacccttagggtcttgggctgaaatcattgcacttgtacacaaccagtgtaggtaatggaagttcatcataatgtaacaagttcactcagtacttaatataatcgaggacacaatccataaaaatattcttcctaaactaatcaaatcattaaaatgtcagcttctacacagacgctccatggcactcctgcccctggcccagattcaattcaaatggaattttgctgaatcgccctgatttatgaagtctgtgtttcttcatcctgccccctccctgttgcttaactctgctgcctgaatatagttgtcccagcaagaaaataaactggctggaagccagaagccatgacacaaagcaagctcttgtcaaacggtttccttattagctgttcacatacaataaagactgtaaggtttttcccctgtatgcaacgcgttcagagcattttcccatttgttggaaaactgagatcaggaagaaaaataactcttatgcactacatgccagagagagagcactggattcagtgagagagaaggagaaaaagagtgtgtgaatgtgtgtgtgtacacacattgcagcccatggtttattaacagggcctaattatgacaattgcttcctgtgggtctgtaatcagcctggtatttctcaaagcactctattggagcactgctcactctagtcacagattgcctgaatattctccaaaacaaaactgataaaaataaacagctcgttttgagggtattcacttctgaaactgcagtaccagacacctcaataggaaatatctcatttgccccacactattccaaacccaatgcttcacattcgcacatttcctctacagagatccagaacagtttctagactgcagtgctatccactatgatagcccttgtctagccccatggggtgacttccatttaattaaacagaccaggcacggtggctcatgcctgtaacccaagcactttgggcggctgaagcaggaggattatttgaggtcaggagtttgaaaccagcctggccaacatggtaaaactctgtctccactaaaaatacaaaaattagctgggcatggtggcggggacctgtaatcccagctactcaggaggctgaggtgggagaattgcttgaggccaggaggtaaaggttgcggtgagcagagatcacaccattgcactccagcctaagtgacaaagcgagactccaactcaaaaataataacaataataataataataaacaaaatttaaaattcagtttcttagtcaaactagccacactttgagtgctccacagtcccatgtggcttatggctggaacactggacaataaagatagagaatatttctggcatcacagaaagttctcctggacagctccataatctatagcataacacatcttcaaatgaaagggtcaaaaaatagctgaggatgagcagttatttttctttacaatggtaaaaaggagtgtgccaatctctataactgttaaaggaggcatactcataattatttttatttttcaataagataaatttggacccaatgcccactggcatttttatcataaataagtgttaacacataagcataaaataatcaaagaaattcaagaaatatttattgaataatcactatttgcaaagcactccatcctagcacacattcactgcctcagctcccacggaaacccttcgagcatccatcagtacatcccaggcagtcacggccatttgccattcccaagtaagttatacaatctcatgccccctccttttatttttcaagctgtttttttttccccccaatggaagcctcccttgcctgtaaaaattcaaagccccactcaaatgccacctattccatggactgtcccccagccctgcaagaactagcccatcaataatagcattcataacaacagccaacatctgtgaatgtgtgtcaatttgtactttacacagacagtatcttatttaatcctcacagacaaccctatgaagcaggtaccactgttgtttccatttgaagatgaaaaatagtgaccaggcacagtggctcatgccagcactttgggcggacaaggcaggtgggtcacctgaggtaaggagtttgagaccagcctgaccaacatggcgaaaccctgtctctaccaaaaatacaaaattagcagggtatggtggtgcgcgcctgtaatcccagccactcgaggggctgaagcaagagaatcacttgaacccgggaagcagaggttgcagtaagccaagattgcaccactgcactccagcctgggcaacaagagtgaaactccatctctgaaaaaaaaaaaaaaagaaaaagaaaaaagaataatagtgaaggtgagaaaattaaattacttgcctaaagtcccacaactgataactaatggagctggaatttgacttcaaggccctctaacttcagataccacattcttaaccaatgtcctgtgcactttctttcttgtggtgcatatcctttattcctttcattattctgagttgtgcatacatctgtctcaatctcatctccttcccttgtcaattccttgaacgcaaaaaccacatcttattcacttttgccctcacccagcacacaataaatagaaaagaagaaacagaagattgttgagaaaatgaatgaatgaatgagtgcttctatttggctattggattgtgactgtaacttgcagaatctagttctagaccaaactaggacatggtggcccttttccatcccctgacatgattcttgggtccaccatggatgtcccagtcttcctctgaacaattttcaccattacaccaataagtcatggcattcaatagcacaggccaagatttaccaactgtcagattctgagtggcagccagaatgtcatccaagaagtaatacttgtttcaagccatctaccctagggcccagcccatgtggacagcagatgacagcaggctacctgcccaggctgactagtgagatgacataggccgactggtgagatgatgtagactgacatccaggggagcaggtggaagaaaatgctggcacagggaacctgtggtataatctcaatggctatggaatcctggggtggaaagagtggcaagctgagctagcattcctggaagagccccccgtatctggaaggcttgaagaaacattcccacagggctaaaagcactaggcatcaaggaaggatgttacagctcatttcaattcaaacgacctttactaaatagctacacagggacagccctggggtctggggagtagctatttaaaggtgaattaaaacacgctgcaccctcaagaaactcattagtctagcaggaagccagacattaagccaatccacagtgatacaaggtgatcttgataaggcctagaatgaggcataagaagactcgggagatggtaacatcattagttcagaatgagaatttctggtctgggaaaaactttacaaaattgaaatctgtctgggtcttgaaggatcagtaggagtttgacctgtgggtacaatggaagctgctggcatcctgcgtgtattccttttattggtcagtgcagtcacccctaggctgctgggatcttgcaggggaaatgcctgggtaattacctacccccacccaaaggcagcctacagccagttagttactgactgatatgggggtctccatggggccatacatgccattcatgctacagattccccaggggttaaggcggaggttggacttcaactagacccacatccttccccagcttcctgccctgccccatcctgcttctcacattcctttactggcttctacaaagaaataattctctcaataagtcacttgcatgagaaaccccgtctcgggactcctctagggaaccctacctaagtcagaggcaagtgggggagcagcaaccaaagtagggagattgtcatgtgcaggcaatccaggcatgaatatctgatgaatgccggcagctctaccacgtatcatggtaagatgttcagatctttattatgcaggaaatacacagccactggacagttagaggaagataagaaaatcagagttcctaagctgcaaaattttaaagcagggactttgctactataacatatggaggggggaataggctaggcccatagttcagaaagctggtggtctgtgcagcctccagtaaggctggatctagggtagtgagagtggaacctggaaaaagggtaaattcaacagaggcagaaaaagcaacacactttgcaaagtagtcaggaaggcaaacccaggcattcgccacacacagcgcagaaagggttgatggtgagtgatcattttttcagcccaaaccacatccagccttcttaagagacctggcacagaagagctctgttcatatacatggcacaccctcatgttaaatctttggttattccagaatggatccttctaaaagtttcaaacacaaaactcactgtcacttttcttcaagtgaccactcattttataatgaaaacatgaggtagaaatcacaacttcaagcctcctgccatccagtttaagacctacaggcaaaacgtacaaatggctgggcagcctcacccctcttgctgtgtcactccacactgtgaatgccatgactgtcactgcctgtgctaatgctacaatcctagttctacaagtggaatgcacagtatcatcctattttcagatgggacaactgaggatcaaagtaagttgttcaaggagttataggtctaatgggccccaacactgatgaccttcccatcacctgctgctaccgtcttagcctcagtaatgtccaacctcattaattttaacatggaggacccatccatatattaaaatccaattcttctactctttaaactcagctcaagcttcattccttctattaagtctgtaacccaaatgaatcagaccttttgctgcatcctcattgtacctgtgtgcacagaccacaactgcaccacctatatactacatacttgaggcatacatttatcatcactcctctgggtttcttccttatgagactgtaataatgtaggggaaaggcagacctggcccctgtctttatacccccagaacctagcacagaggctggtaggagtaaatgataagaaaattatactcaaggacgggtgcggtggctcatgcctataaacctaggactttgggaggccgaggtgggcagatcacctgaggtcgggagttccagaccagactgaccaacatggagaaagcccatctctactaaaaatacaaaattagccaggcatggtggtgcacgcctgtaatcccagctactcgggaggctgaggcaggagaatcgcttgaacctgggaggtggaggttgcggtgagctgagatcatgccattgcactccagtctgagcaacaagagcgaaattcggtctccaaaaaacgaaagaaaaagaaaaagaagattatactcaaatatccaacaagttctgttgaatgtttttttaaacattcatatgtaatgaaaattacacttgatatatactaacgctatgatcctaattctacaagttgaataaattggatggcccagggtctactcccagccctgacacgtagcagtcaaagtgatcctggggaaatacagagcttcttggacccatagattattggcacatgaagccattgggctagaaactctcaaacgtctttttgaatacaaagaatcttgttgctactcacatttataataaagcaaaatagtccatatccaattttccagtagctctttgaaatggatgtttgtgaaaacattcatgtagaagccctaagaagtttagccagaaaacctaactactttcttctttaaagagtatttgctaaggaagcatttatttaggcaattttaaaaaatggttttaagtctttaatgtaaacattgcctgataatggcaagagtaggggtaaacagacactactacaaactgctagtaagaaaataaattgggaggtcttttgtggaaggcaatttgacaatttatcctatggaaatacctgaggaggcttgtaaagaaatgctatgattataatagtcacagcaccgattgtaacaatgcatattgcaaccaaatgacatacaattatttgataaattatagtatatttatgcaaaggaatactatatagtcacatacaaaaaaaatgtgtttatacaagtatattcagtagaatggaaactgcctagagtagactgctgggtgaaagaagcactttaggaggcagtgatgatattcctgcaaaagaaagtacatgtgagtgtttgcacgtacatgcctgtggtgtacatatcagcatatgagcacacagatcacaatcaccaggaatatctgagaggtaaaattatcagtgattttaaattttgccattgatattacatgtgtaataatgtacgtgtgtattttgtttctagcttgccatatgaaataacctttagatattggggcaggaagtgcgtagctgggatgtgatattcccacctcctttaacagtgtgctggttacttaggcctcattcttctagtgtcattcctgttttggttgcagggtcacctatgccagggccccagcaggtactcctggcaaacctcaccaagctgtatggtttcaccctcccaccccctctgtatgcgccataggctgttatctgctgtctagtttcaactacctttctcagaaactctcatttccgtatgaaagacagaagggagatcaaaagtgtgtggctggttttatctgttgtctctctcctaattctacttttaactactgtaaaagaagtggaatctggcagggcatggtagctcatgcctgtaatcccagcactttgggaggcccagacaggcagatcacttgaagtcaggagaccagcctggccaacagggcaaaactccgtctctacaaaaaaatacaaaaaaaactagctgggtgtggtggcgggcacatgtaattccagctactcaggaagctgaggcaggagaatccctggaatccgggaggcggaggttgcagtgagcaagattgtgccactgtactccagcctgagcaacagagcgtctccaaaaaaacaaataaaaaagtgaaatcggagttaatgccccaaaggcagcatatattgtctcagtgctccattaattttaacttaattgttctggtactactctttagagctgtttatttagtatttgtttctgactgatgaatgtgaaaaagcgaacattcttattagataacaggtttgcccggctatgaccgtactctgcacagaagactatgtaggcatgacacatacacaataggttttaagacagaacaattccattaaaattggaaaaactcaaatatggttgaaatgcttattaaagaagaatacacatattaaaagaacaggcaattttcattactgatgctatttctaagcctatcccccaaattcaaagtacagcaattattattgacattgttataccaacaatgaaaataatatcaccatttctgagaacctctatggaccaggtctatgctcagtgctaaaaaaatagatcatctcggccaggcgcggtggctcacgcctgtaatcccagcactttgggaggcggaggcgggcggatcacgaggtcaggagatcgagaccatcctggctaacacggtgaaaccccgtctctactaaaaatacaaaaaattagccgggcgcggtggtgggcgcctgtagtcccagctactcaggaggctgaggcaggagaacggcgtgaacccgggaagtggagtttgcagtgagccaagatcgcgccactgcactccagcctgggcaatagagcgagactccgtctcaagaaaaaaataaaataaaaaagatcatctcacttacagtccccattttattgatgaggaaactgaggcctagagaagttaagaacatcacacagcaagttggtaaagctgggtgttgatgcccatgcttgtaacccctgtacatcacccttcctcaatcaaatcatcaggacccctctctgaggttccattttagcacttagagaccctggtgattttttagtctagttcttttcaagctggactccacggagctcttgatgccatttgggcaaaggggggcaagtttaaggatcaggggactccactttcctcttccagttgaagtgctctgtggtttttattttattttatttttgagatggagtctcattctgttgcccaggctggagggcagtggtgtgatctcggctcactgtaacctccgcctcccaggttcaagcaattctccatcctcagcctccggagtagctgagattataggcgcccaccaccatacccagctaatttttgtattttttagtagagatggggtttcaccatgttggtgaggctggtctcaaactcctgacctcaaatgatctgtccgtctcagcctcccaaagtgctaggattaggtgtgagccaccacgcctggtctgtggttatttatttcagatgttagacttgcccatgaaattctacatctacagaatatttgaaaaatatcaatgtacaagattactgtattatgttttgtttttgttttgttttgtttgagatgcgagttttgctccttttgcccaggctggagtgcaatggcgcaatctcagctcactgcaaccttcacctcctggattcaagtgattctcctgcctcagtctcctgagctgggattataggcgcgtgccaccatgcccggctaattttatatttttagtagagacgggattttgccatgttggccaggctggtctcgaacttctgacctcaggtaatctgcccgcctcggcattccaaagtgctgggattacaggtgtgagctaccgcgcctggcctagattactgtattatggatgaggaaactgtaatctaatatcaaaagtatgactggggtctagagggtcttcattttaatctgcatttgctaatgaggcatatttgactgtgtctaactcagttttccccttggcataaagacttgagtaatggttttttgttttttactttatgtcaacgctctgagggaggacgaataaaagggactgcaaagcacttagtgcacagtaaagtcctacataagcatttgtggcgcctaatcccagcactctccggggcctgctcctgaagctggtcacagagaaggaaggtacagacagaccagggcctgccaagacacaaccagggcgctgagcaacctacaggagcgggcaggcacgtagcttgggcgagcatggaaaacagacaaaagcgtcatccacaaatggagccaatcctatacacgaggaccagtcgtgggctcctagcttgtttcagcaaacagcaggcattgatccagggcagggtgggagggcccacggcctctgaattattaacttctcctgttcccacgtgaacttcaccatcagtgcttacaccaccacctggcaccgttcggagggattttccaccttcctctggggaaagtgaaacttatatggaggaatgaaacagaattgacttctggcttctctttgagaaggcttccttcttccacaattgcttcatcttcattttacagaggaaaacgtggatggctttgaggccagttttatgatatttatggggcggatttttgaggagtatatgggttacccgagccaagaattattataaaggagcctcctaagcctgaggcagagagatctgttctgtcttgttaaaagggaccacaataagttattaattccatttaggatttgaggcagaggaaagggcagacatgattacacacagatgtgtgtaatccacataaactaggaaataagccactcttgtgggtaaatacacttgattcccagctacagacaggtaaaatgttctgtctctccaactatggccaaacgatttagcagtttgttcagagctcaaacacataaattatatatacttgacatttatccaaagtcacttttttctttctttcctttaatttcttttgaggtaatgtttacatgaaaaatatacatctgcatcctataatttttaggcatcgactactgtgaattaaacttgatcagctctatttaaagggggatgtttatcgcttaagtgctggcaccacaaattgtcctgaaaaagcacaaatcatcactaagttcagaaactttccaaaagttgatgacactttcaccacaatctcctgaggctcactttagggtccttcacaatgcggataacttggggttcctagaaaggatggtcaaaagttgcctaacttgcaacaatgtgagattaacatcttaatcattaacttaaatggcattcctgactattctgtgaaaagcattgcctcaagaacaaatgatgaatagaaaggaagtgatagccttaattcttaaagagctcaaagtctaatgggggatacaagataaacaaaagcaaggacacaaccctattggaagcaaaaacacagagtgcaagtaattatatctgagtaattagcctcaagtaatactgggaaggcaggcattatcttagcttcactttggaggtcagccaaaatccctattcatcccttcgtgggcctctcatttaaggaggacttttcccaactgctatcagagaacaaatatttggaggtgatttttctgcctccagtgatgaatgaggaaatacctgctccccgtctctgtaatcagtccatcaacactctgagatcttggggaggtgtatgtttaatttatatcctacctctttccaaaaaagatttaaggtagcttacagtaaaggctcatatgcctagggcaatgtaaaaaaaaataagaaatatctaaatacattatagtaagaagagatagaggagggtgctctgaagtagtagcaggttggtcttgcaaggaagcaccaagtttggttggaagtatctggcatgcacagcgaggtgagaggcagaaagaagtcattctgactgcccttgccaaaaaaaaaaaaaaaaaaaaaggagtagtaacaatttatgagatgctaactttacttatcttaagtgacagagaacaaggtcaacaaatgttcaccctgctcaagcagcaggttgtattcttatattttaggatcacggactccattcagaatctaagaacgttctggacctatttcccccataaactcataaccatacaactttacacatagtaccagggttccatgaacctagactgaatacttgctgtgggagttctctgtaaagttgaaatttgtataggaaatcctcaatactcattttcactgaatgcataaaaggtcactagttgaagccagacatctcaaagtaatcctttgagtgtggtttcttcctcctgccatgtatagccaacaatggcttgtagccaaaaatgggatcattccacttgaaggaacttgaccaaaaccctagtaatttgtcttggtcttcattttttcccactctttatcttgggatgtgcttgcattcttatgctgagatatttttcctgtttatctacttatgttttgggttgttggtttttaattcttggctttcacatattctgcatcttaaattctcctaatttactgtgtaattaaaacacccatgcacatttgttctcaattaatagagacaaattattccccagtggaagacaactctattccaacttgaaactggaagggcagataggcctgaattttaaatgttgtctaacgactctaatattctttgttgagagtatttaagagataggttaatgtatccttgggagacaaatattccaaaaatctcatgctaaccctcagaaccagatgattctgcaagttcccaattttgtaatccttattaagtatattaggaatttgtttataaaattatcctcagaaggaagataaaattaagctggataaaataaaaggcagttgaaaccagttaaatagcctttagtttgaataccaaatattcatgtaaaatcgatgcatccatcataagcctacatacttatggctttagaaatatttgagagcattaaaaaataataatggaccagagagaaagttgacatatttataatccacaggtaagtctaatatcagtacctagtttgtgtgtgtatatatacacacacatacacacatatacatatatatacatgtatatatgatatataaatataatatatatacgtattatatatcatatttgtgcaaacatttggaagttattcatttaagcttcattgtgaatcatttgcacaattacaaaatagattgtaattagagctcaactatttcatacataagtaataatatgatggaaaatactcaacaatataaaacctggtaataaagagacatcttactaattaagatttcaaagggatatttagaaaacgaaagagagaaaaagaatcattcttgaggatctgctaatctgagaaactatcctaagtactttatttaaaagacttcttttaagcccaatatcagtcttatttgacaaatgacattatgcccatttttaagacaagataactgggacttagggaggattagatggcatccaaacattcttctaaaattactaacaaggaggccagatgtggtgactcacgcctgtaatcccagcactttgggaggctgaggcgggcagatcgcttgaggtcaggagtctgagaccagcctggccgacatggtaaaaccctgactctactaaataaacaaacaaaaaaacaaaaacaaattagctgggcatggtggcgtgagcctgtagtcccagctgctggggaggctgaggcatgagaatcgcttgaacttgggaagtggaggttgcggtgagctgagatggcacccctcgactatagcttgggtgacagagcaagatcccatcacaaacaaaataaataaaataaaataaaatcactaacaaggaaagttctagtagtcttgccataaagtcaacaacacatctttggaaaggccacagacctttcgaccagcagctatttcaagtaactgattctcagctggctggttgtaacagccaaatgcggatttacactgagtactttgttcagggttcaacacattttacatcagataatgcctgctgttcccatttttcctagaaatggggtatgagtacaattcctgtttatgtaaactcctgccacaatgaacctttacttggtcaagataggataacacgagggctaaaggaaagaggccacaataggagaaaagctatcttctgccaatatcagggtcaagtccaaattgtccctttagggcttaccctgatagaaccagggataaacacattgggagaagaaatgagtttaaaaacaggcacagaaagagatttttaaaaataggtatattggaccattagaatagatggactatgaaatgtacacaaagatgttattcaagttcaccttgattgttttactgggtcctaaccaggagctttctgtaactagactgggcatatcaccctatcatatgtttaacaggtggactgtactggctttctacattgtactccatgaagaaacaaaaattttttttttaaaagttgtaagtttctatacttataaccaaagaggcaaattatattttggggggagccttattgatttttggaccccaaataagataaggattaaatcaatgtcagaaataataatatgaatacacattagttaaaaaacctaattgtatttgagatcatttccttatggaaaccttttctgagagctaatcaatccctctgtaaaaggagaaagtgagagaagaggtaatgttttagagtgttatcgtgactggttattttaagggaagaacagaaataacttggcaaccaggagtcaataggaatggaagtctttctgaaatgatttgtatatttccctacctaaattggcctcttttactcatctatctttcacatgttatacaaagcctgtttatgaaagtgagaatataggttcagggtctcacagcaaatgggataatggcataagcagactcctgtttttgtgattttctcaaaagacatttcatattttgtaattcagtaaccacagcaccaatttctgagatgtaaacttgattcatgtattcattcatacattcatacaaactagaccctgggaacacaagggaagaatgagtcatggctctgccttcatggaagatacctgctgcctatggaaaaagacaaataacaagaaccaaaggaattatgactgtgatagagacatagacaaatgactatatacaagccactcttctggctactcttgatttagaaattatcctctttatgtagaccacttcctctgctggtagcacacttaatagatgacgtggactatgtcaggtctataagctacaacccatggccaaatctggcctgccacctgttttggtacagcctgcaagctaagaatgatttttacacttttaaagcattaggaaaaaaaaatcaacagaagaataatatgtgaaattcaaatttcaggttcttaaatagttgtattggaacacagccacactcactcatttatgtaagatctatagttattttcaagctaccatggcagaattgaagagttgtgacagagaccatatggctcacaagaccaaaaatattaactattttgctgaccctggtttagatggtttggaccttatctaacataagagtaaattaaaccaatgtcagaaattattagtatcagaacacataaaaacacagctcctagtggcttccaaaagaactaattcggtaattaccctaggaaaatcacccagcacacatcagtcataaaaatcctgtttttaaatacacatcaccacattctgtctttattaaatagcatacacattactggtataggtaataaattatgaaatactacaatgttatctgaatacaaagttagtgtcaaattacttttaaaatatagttggttcatacttgttcaaaaactattcggcaaacatttacagagtagtactgccttccaggtagcctgctaaacagcagaaaaaggaagatgagaatgacagtcatttaaggaatctatgtttagaaggaaaatataatcaaccctcaaaaaatatggtgagacaccaggcgcagtgtctcacacctgtaatcccagcactttgggaggccaaggtgggcagatcacttgaggtcaagagtacagcttggccaacatgatgaaatcccgtctctactaaaaacacaaaaattagctgggtgtagtagttcatgcctgtaatcccagtcacttgggaggctgaggcacaagaatcgcttgaaccaggaggcggaggttacagtgagccaagatcatgccaatgcactccagcctgagcaacacagggagactgaaaaaaaaaaaagtggatgagaaggcatttcataataaagcctcaatattcttttccccactttcagttttgcattggcttaaatgaggtaagccatggaaaatggaagatggatttgtgtagaccaaagaagttcatgaattttatagtaaaataaaggttattcatcaattgacatattataagccatattttgtaaatgactgaatagtagagttagaaagccaaatattaaatagctttcaatattgccaagaatgtctgtgttttaattatcttaattaatttgcctttcttcttttcattcactttccccactgtgtccaaataacgattccctcttttgttgctccagtcttccagggatttgtagactgtcaccttattttgaactctgatccagctggctcctcagctgtcacttagccaactataccaattatatagagatatatagttagatagatagatatacatatatatacatatatctgctataatctttccctataagaccattcagctagcataaccatgctagactgccattcactgaataaaacctagtgttttacattgaatagggatacatcctaaaggctgggaccccagattataggagaaatgatcattctgctcccatgattctgcaaatggtttttcttagcactgtgagccccaatgaagcaaacagcctcatcaagtactctctcagctactctgctttctccactccacctatctcgtatctaatctgtgggtcacatgtatggtgacagtgccaccgtggaagactcaaatgcttatgactcaatgtgccaaacaaccagcgccaaattactgagagtgaatgatgcctctgctcccatttcagattagagtgtgttatgcagccatgtagttgggtcatccctgcaactgttttatcacctctcccattctttaacatttcttataaaaccaatatattatgatgccttcaatattgtcataataataatacatacaatgtattaacaaataaactctcctgtagtcccagctactcgggaggctgaggcaggagaatcacatgaacccgggtggcggaggttgcagtgagccaagatcgcaccactgcactccagcctgggggacagagcaagactccacctcaacaacaacagaaaaaataaaaataaaaataaaaaaactgttatttaccgaaagattattatgtgcctggcactgtcttgcatgctttatatgtattaactcatccggttctcacaataatcttattaagtgctattattatctccaccttacaactaaggaaacaggctgcagtaatccatttctggtcttgttcttcctttctagaagaatctctcctgtgtatctcctctcttcccaggggctgtttgcttgacccgcgactaatggaagcccagctctgactgcccctcaggggatggctcctgactgccctagctatccagggtactgctattctgccagtgaatgatttaaacagagaagcagagaggaagtccactaacgggttccaggaaagtctcttgctcctaagaggagacccaaggaggagactagaagttgtcatactctgatgtgatgtctacagctgtcttgcccccataagatgtccatttgtgacccaaactggcatgctgagatggcaaagtgaagaaaggtaaagtgtctaaaactctagggatatgactgagccatggactgagccaactctgaagctcccctcccactctattcgttgttatttagattatatatgtccttgctaaatgatacaaacaatgaatacaactgaggttcaaaccagcctatatttggagtcttatttgtaatcccacctatacaaggatataattcaaaaccccattacggttctgcaaacactctgcatctgtgaattattcaaaacaaatgccctaccaagagcataacaccatccaactcatatgtgggggggacctgtttctctactggcaatgctctgacaccaaacttatgggtttcttcccctcacaccaacaacaagttctccaacttcctggaaacctacttgatatctaatgattgaattcaattctgacagtaattacccagagttaatgcagacaccacaggttaggggctcagagccacaagattatccctcacttcaaatgccaatcacaagtctgggtctcctatacttctcaccaactgcctacaagtcaggggatctcatgactccctcctcaagttcaatcgtttgctagaaggggtcacagaactcaagaaaacagcttactattactgatttattaaaaaggacataatggatacacatgaacagccagatgaagaggtacactgtgtgatgtccagaaaagtcccaaacacagaggcttctatccccatggagtcggggtgcaccatcctcccggcatgtggatatggttatcaacctggaggctctccaaacctcatagtttagaaattttgagggggtttcatcacataggcatgatagataattaaacaatttccagcccctctctcctccctggagaataggggtagggtgggttagaagttccaagcttctaatgacagtttagtctttctgatgacatcaccactttgaagctatccaggaacccactaagaatcacctcattagaacaaaaggtttatcacccaggaaattccaagggatttgggaattctgtggaagacattcttatcacctctatcactcaggaaattacaagggttttagcagttgggtgtcaaggggcagagaccaaatttttgagacagagtctcactctgttgcccaggctggaaagcagtggtgtgatctcagctcactgcaacctccacctcccgggttcaagcgattctcatgcctcaacctcccgagtagctgggactacgggcaggagccaccacgcccagctaatcttcgtatttttagttgagaggaggttttcaccatgttggccaggctggtctctaactcctggcctgaagcaatttgcctgccttagcctccccaagttctgtgattacaggtgcaggacaatgtgcctggcccaaatatatatttcttatcatgtcacatttaccaagagtgtaccaccattcaccccagcctgcccttatggcaaggatccagcttgagtgtaccccaggcatgactggttcttacattacaataaacaatactcaaaaagatggaacattaacataatgagaaaagcagcagcagatttaaaaatcaaaatgattttagagtatttgctgtttacagataatctgagcctctgccatctattttaagcattattaatgaatgacaacaacacacacaggaaaaggagtgaaagtgataactacggatttttttttaacagcaaaaaaaaaaaaacaagtcggggatcccagacgctgaaacaggaggcccttggcacgggcctggctctgcccagaagtaatcacttccactcactggacctcagtttcctcacctagaagatcagaggggtttataaaaaggatgtgaaacttgaatttcctgactactggtggaagactctgactaccattctatgagaatctaccaaatgattccaaggaagtatttcaacatagaggaaaaggttccctttgctttctcatcttaaactctaaaaaaaaaaatttttgagacagtctcactctgtcgcccaggctggagtggtatgatctcgactcattggaacctccacctctggtgttcaagcaattctcctgcctcagcctcccaaatagctgggactacaggcacgcatcaccatacctggctaatttttttttgtatttttagtagagacaaggtttcaccacatgagccaggctcctctcaaactcctgacctcaggtgatccggctgccttgacttcccaaactgctgagattacaggcatgagccactgcatccagccttaaaattataaattaaatggacatatattccaaggaaatccaagctaggtttccttaaccatgagcatatattcctgatgggggaagaggagagagaaagaaggaggttctgggagtgcaaatacaccagagtgggcacaagatacccgcctccgtgaaggaggcactaccagctggggcctggaaaatgttctgcccaattcaatcccgtgaccatgaagtggcaagtttgaaacatgttgtttcacttttcccaggctgtaacaacagagtcataatttccttcttaactggaaccatctgatagttccggggaagcagttcatggcacgttctctttgctttgtgtcttggcgacagcactgtgttaagagtcaccaagagttacacacacaacgaggggaagagcctcaaaagtgcagagaaaccacagcaaatattaaaagcagaagatctcatgtgtgtgttttaagagttttttacatcacccccttattgctgatatttttggaagactgctaaaacaagatgaaagctgaggattggttaaattcattacttttgactaagttgcaaactatgcaaccagcgaaacagtgctactaaattaatgcctctaaagagatgctggggcctctaataagcatccaataactccctgaatggcagtgagttcataatggcccttccccctggcctctcggcccggaataaacaggctgcaggtcttacggagggagccccaacgggagacagacactgaaacaggaagcccttggcacgggcctggctctgcccagaagtaatcactttcactcactggacctccgtttcctcacatagaagatcagaggggtttataaaaaggcaaactcctcaaggttcccccaagtgcgtttttaaaacagtaaaaccctgccttgcttacacacccagcacaatcatttgagatgttttcatggggcattcaaacgttttgtactttaagaaaaatttttaatggagggtttgggctggaaggagtaaacaaagtttattcttttccttctctgtgtccagttcccaaagaagataaaaatgctaattccagctcaaagttgaaagcatatctgtgcagttcaagatacttaactatgtttcagttgaaatggacttccttaaagatacacttgagataaagttatcaccaacagatgttgaggtgatcttatcttaaccaactcaaacaatcagctcattcttaaaacagagttaatgagactggtaaaggtggaacctaatggttattttggaaaaggagggaagagaacagtatttaatgcctttaacaaactgaatacccacctcaagagttcctgttaccaagtctttttttttttaataagtgcactttctcttcaaaggtttagaaacttatttaaatggagactaacataaagtagggaagaatgcctcaggacttttctcaagcataaatttctttgtgaacaacattcatctcataggaaagcatccagatgttgaaggttcacaggagaaatagaaacagaatgtatggatagagcctagaaaatgaaatctatagagctacatcatcacacttcccatatatgaccctaaaccttctaaaatgaccttgacttcccgaaagagccaaacatgtgtcttgtctcacatttgaattaaatgtgtcacttctcccctccaacaccaaaaacaattggataatgaagaaacattgacactgaatccacatagaaatgaaaacaagactaggtcatcaaaatatttatctgaatcacatctaaactaaaaataatctttctatttaaatcattctactataatttggttgcttaattgctttccaaattaaagcaatgataatagtgaactagagtctaaaaatttaatatcagagaaacacaataatcaagtctattaaatatttattgagcatttactatgtaccgaaaggcactaattttactacctgcacatagaactagagcattcttttcaactagcctaagcaaaagtatgtaatttactaaagttaaattattccattgaaaacagattcaaggcctttttttctttcctaaatatgccatttctctcacaattcttgcacttaccatctctggctcccctactaaacattcccattttactccacatgcaaaatctcctttctgaggctactgagaacaagcaataggttgggtttttctgcactgatcctagttacttcccttgaccaaacagtccaggttctaactgcaatcactaaggggcccttgtttgaactcctaggaggtccaactccacacttcctccaattagcatcacattggacctgagaaattccaacaggttgtgcacaaagtgaaggaaagagaaaatggcttaagaatggctagtgcctgtgaaagctgcatgccttagggaaagctggccaagggacaggcagcttttcccgcaggagacagaactctcctgcctagcacccaaggccggccctgatcaagctctagcctagcacacaaggccggccctgatcaagctctagcctgttcccctggcctcacctctgtccatcactcgcttctgcttcatgtttcccacaaacaactctgtttcattcttctgtgcccttgctagctagcactatatttgaaggccagaagcgtcttcaaattataaccatgggaagcataccactaaggaagaggacaatgtaactgaggcagttctcggcacagtccttaccactgtcatcatgatcacctgcttgaggcagatgctggataagcacttcgcattatcttatttaacctcctcagttcacagatgaggacactggagatcacagacagtaagggagataattatattggacacacgtttgtgtgattacacagcccaagctcatattaaatgcattgtaatatttcttcataatacagctgctcaaaccacagtgaatcaggcacttgagcccggtgtcagcatctaggaacccaagttaaggagggtggctgcctaagttcataatccacttctgcctctactttctctaaaagatagtaaagttacttatcatttcaaagcttcattgtgacttcacagagttgtcatgaacgttatatagaacaacagattggcacataataaatacccaggccggtcatggttgctcacgcctgtaatcccagcactttgggaggccaaggcaggcagatcataaggtcaggaattgagaccagcctgaccaacatggtgaaaacccatcttttgtaaaaatacaaaaattagccgggtgtggtggcaggcacctgtaatcccagctactcacgaggctgaggcaggagaatcgcttgaacctgggaagcagaggttgcagtgagccaagattgtgccactgcactccagcctgggtgacagagcgagactccatctcaaaaataaatacataaataaataaattaaataaaatagatacccaataaaatatacaaagttgtgaatttgtcttcaaatttagtgcaatttgcacttttcatggtaaaacttgaaactattttgtacatgtaatctaaatgcaatcctccccaacattttaactccacctcaactttgctttctttgaaagcttataaaaagctccaaccttaatggactcttccagtttttatttatctaagccaaacacaaataattcaccaccaccatcaccctgtcttagaggaactcaactgagattggatagagaaacaaatcaggtaagtgaatacagcttagaaaacagtttcactacttttgtacataattataagtacctggatctgtgtagtgaggaactttcaccatgcataataaagagaaaaatgttgtaatcagtgcataaaattaaaatagtttaattacaatttggttctaacagaatcgactgcctaaggtggccatcttgaggaagtgataagagcatcctggacacggagccaacaaaggatgtttaagcagcaaaattagacatttaattttggaacttcctacttatgagaagcctggggcaatttgtgtgagtgttagtgcactgaagagctacaagaaatcctttgtttttcaaataatagcggggaaaaacacgacagcaatgaaatatgcctgagatggtctacactacacacttatcctggtgattctagtatcaaaaaaagaagaacaaggtgcaatactctgcgcaagagtcataaactcttttgtgggaagtagagggtaaatgggcaaatggtcgtttactttggcattgaggaaactccaactttgaccaaatttcagggcattttcttagccaaagcatttctttccctccttccctccttccctccttccttccttccctcccttctgtctttctctctctttctttttttttaacaggcaaagtcttgctatgttgcccagtctgaacttgaactcctgggctcaaggagtgatcctcctgcctcagcctccagaacagctgggactacagggtgcaggtgactgcacccagattccaatcatttcttgatttggaagcagatatgaggaagaagcataaagattgggggacagggggattctggcatatgggccttaggataaaaaaaatagttttctttgatattgatcattggcttgaatatgctttgcaattaagatttatagtgaatgtaagcaaaaccagcacctagaaatctaaatgtaccaaaaggaatattaggggataagttgacattttatgagtctatacttctgaattctctaaaacagcttttaaaataagctattctaattggatgcaatttgcaagcatgaaacatacgtgcacttatttcaagaattcatatataaagtgagattcagctatatgctgttaaggataaatattcttgcagcaaataagaattgctcttgcaccctaacgatggatctttctaaagagaacattcaagagaaacttcaggtgcttacaacatgcacacagaacaaactcttaatggcgggctgagctcctgctgctggcctgaaaaacggggtctaaacaactcctttcatggtcgccttgcatagaaccacagatctcatagttgaaaggagtcttgatctgccagctctctgcctgaactatgaactcgccacttagtgtcctccataagtgagtgctgaaaaatctgtttgggtaaatggtacctcatgtattaattaagaagggtcagtgcaggggaaaaaataccagcaaggcaatcaattccttctttccactgcctcagatttgtgcatttaaacaatgccacctcagtaggctcatttgtcagtttaggtcactgatttcttcctcagtcaccaggtactaggcaaaactaccacttcctggtagaagaatatgcttcagactacccagtggctatagtaaacaaaccattatctatttggaatactcttctttctatgaatctatgctatgaaaagcagaaactgcttacgttgcttctgtaaagtgtggcaaaccaaatttagccaagggggcctggtgctgtgcctcacacctgtaatcctagcactctgggaagctaaggtggaagaatcctagcattttgaggccaggggtttgagaccagcctgggcaacacagcaagacctcatctccaaaaaaaaaaaaattagccaagaatggctgggcacagtggctcatacctgtaatcccagcacttttggaggccaaagccagcagtcacttgaggtcaggagttcgagaccagcctggccaacatggtgaaacgcccatctctactaaaaatgcaaaaattagctgggctttgtggtgcatgcctgtaatcccagctccttgggaggctgaggcaggaggattgcttggggctgcgagacagaggttacagtgagcccagatcatgccactgcactccagcctagggaatggggaaagactccatccccccacaccccccacccccaaaaaaaagagaaaaaatggtggcacacacctgtagtcccatctaatctagaggctgaggcaggaggatcccttgagcccaggagttcaaggctgcagtgggctgtaattgcactgctgcactccagcctaggtgactgtagggtacacacccctgatagcattaatttaagcatacccttagaatgaccctctagggcagatgcacctgaatgtgtgttccaaggtaggaaactggacatgacaaatctggagagtctttccttatctatgaggaacatctgagctgctctcccaccatcccatcccatcccatccaatagtcttgttccttcccttcctgttccctggaacacaggctgtataggggattgaggtgttgagtttcaggttaaatgaaggttaccagtggaggtcgttagggcaggtgttaagttaaatgccatataaagtacatgatgtctgcaggcagctgtggttttcccgaccagcttgctgccactgagcctgtggttaccttgtccaactagctgccactggaccatttctgtacataaggtggttctcctgtccagccagccaccactggactctctctcctgtattaagcccttaataaaactccatgtcttatttgctggctctgagtctcttctttggccttttgaacacggcgccttctctattcgagttttgttgtggtggtggtggtggtttttcatttttttattttatttttgagacagggtctcactcaatcacccaggctggactgcagtgccaggatctcaactcactgcaacctccacctcccgggttcaagcgattctcttgcctccgcctcctaaatagctgggattacaggaagacaccacacgcctggctaatttttgtatttttagtggagatggggtttcaccatgttggcaaggctggtctcaaacttctgacctcaggtaatctgcccacctctgactcccaaagtgcttgaattacaggcatgagccactgcacccggcccctattgaggttaattggggtttggcacaacagcaaaagagtaacaccctatctctaaaaatgctcctgctaactattttattcccaagaggatgatgtgtgtgtttgtttatgcaaaatatatggagattttattacatgcaacccacatcccctcccaaccctttcatcatgaggttcatttgatgaaagtcaccataattttggctaaatggttatgttgattaaagttagtgaaaactataaaatatgcagtattaagtagaaaccactgtgcattgccaaagaaactgctttggggaattacagtgctttgtatcatttgtttacttatacactttacctatttcccctccatccttttaatttacattatctttaaagataacaatgtaaagcttcagtctagacaaccctcccagctgatctgaaatctggaattagtggaattccaatgaagtgcatataattcttgtctgctaagtttttataaggatccccttaggtcaactccacattggcttctagagtactgcatgtacagcaaattctgatttgtcttcccttcctcctcccctcaaggtatgtgtgtaagcatgatatttgttggtggtagcagtgaaggagtggggagtgaggatagtggacagaggttaattaaatcacccaaatatgatttgtagaatatctcctcttctggtttaattcttctttccaagtacaaccacaggagtcaaaagagcaccttaaaattttccaacaacctccatttgggaggaatgtgaatttcacagaaagagaaatttttgtgggttttatgtctgtgtgtgtgtgtgtttgtttgtttgtttgtttgtttgtttgttttttgttttttgagacaggcccaggcggctggagtgtagtggcatgatctcagctcactgcaacctctgcctcctgggttcaagtgattctcctgtctcagcctcccgagtagctaggattacaggcgtgtgccaccatgcctggctaatttttgtatttttagtagagacagggtttccctatagtggccaggctggtgttgaactcctgacctcgggtgatctgcccgccttggcctcccaaagtgctatgattacaggcatgagccaccacgctcagccagaaatctttgttttactcactgttataagttcaggtgcctagaaggatgtctcctgacacacagtaggcattcaataaatatttgttgaaaaaatgaatacataaaaatgaaaaagtcagaaataaatgatttaactataatttactctcaatacccttcatgttgggcttgagatacgtagtgtcttgtttttttgtttgtttttttaagttaatcattgaaagacacaaccagcgtatcctctggaacttgaaaataaagataaaacatagtataaattatgtgttgtttttctttagtcctaagcacagagcaattttgtattagattacaaaatgtctgatgtctgggcatcagtcagcagcaatagaatattaaagatcagatgggctgattgctactgtttaattaataacctggagtggaatcagtgccgctagttggaatattcccttagcatcagggcactaaatatttccatttagtgtttcaatggatacactaaaaacaagggggaattaccttgaaagaccaccaagagtaatgttggcattttggggtcagaagtctctgattaaatagtttcaaggtttgcagataaatattgtgcaattcaggagatcataagccaactttagaacttaaaggatagttttctaatacatatggaatagaatatttttcttcctctttcagttattttgtaagttagatagaaactgtgaaaacactagcacattgtcagctatgtaacaggctcaatacatattaatcagtgaatctcttgagcttttctctaatacccaaaatgaagctactttcttagaattagaaaaaataatgagttttctgcaactagttactttttaatcctaattatgtgctaactattcacgtagataattctgatatgtggaataactaaaaatcttccccaccatgaacaaagggtaatgtccaaatttccacttggaggaataaccaagcaaagtatttctttttcatcaagggcatgtccatggtaaaataaataaataaacacatacatgcatatacacacacacacacacacatatatacacacgcacatatacatatatatactcacagaaatcacctgttttgttagccaaataatcatgaaacgattcaaagtgtaattatttcccaaaagtaaaaatataataatccaatatagagaaaagtctccacatattcttcaaaggaccaccatcacagttgtaacttcatatccttgtcatggcagttccccaaggcagcatcccattccaaaacgaggattctttcacaaggaatgagatctctgtgtgtattacgacaggattccaaagtttagaacttttcccccttgctattcagcctgttgacaggataataacatctaatttagcacagccatgtgacagacatgtcctcctaaagtgctttacatacaatgtctcatttcatcttttcaacaaggtctgttatattaataataacatctccattttgctactaaagaaactgggaggtcggaaaggttaagtaacatggaggaggtcacacagctagttagcatagggaccaggtgtcaactttggggtttctttgacttttaaagccaggcttttgactactctcatatactaagtctggcgtatcccctctttcctttctttcccgagggatttattctgttctgcatttcattaaatctgaaacataccaactctaccacaatctacatgcaaacaaataattctccattttgatgaagggaaagactaaaaataattctttaagactgagaacaatatccactgacaactttgatgataaaatctatttttattttcccccttttcgtttttcagcctaatgcagttcactttgtcccttaaacaaggtgttccactgctattgagaaaccaattttctctcaatactttattgcaacattatcaagaaactagctacttaaacagcaggtaaccttctatttcatgcataattaccatgcactatattttgatgtgatcctaatggccctaagtacgttttaaacaaaccctcaacctgcccaaatgaaaaacattttgcttcctctgttgcacttgtgtggcaatgataattaacacatcttgggaaattcgggctacatctgattaaatcataacacaccataaaggtctttacaaataatcctttgaagaatccagctgagaaaatcatgaaaagaagaattatgagaaaggaagctcattataattttgtgcctggcacttgaaggtgagcattttgaaatcagtcaacttacccagaatgcacctgaatgtctgaggaaggagagctgtctgtgtgaccaactcttcactcacaaactccatacttctgttcagtttccagtacctttattatgtctttattttagtcaatgaccaaggtaatgctgctctttcctcagaccaaaaacttaaaaagcagtcattaaatattttttaaatttcccttcacaagaggaggtatcttcagacttccatgcttaaaagttcagcacttgagagaatgtgtttataaatggaaacataaaatatggtttgaactaaacaaaacaaactttgggggaaaaaggaaaaccaaacccaggaactaagcctgctttattaattccaaaggcccaaagtcaaatgagatgagcacttggataacaagggcaatcatcccctttaataatggaactatggctattattacggttgttgctaataatgattgcacttgccacttattgagtgcttactcatggattctgctacaacagtgctgagagttacttttaactcacagaacagaaatctaaaggtggagaggtaatgaagccacttgcccaagatcacacaagtgtgtaagaacaaagtggcagatacgtaaaacaaacgagtctaaagatctgatgtacatgaggactatagttaatagtattgtattccatatttctgctaaatgaatagattttagctgctcttgccacacatacaaaaaaatgggtagccatgcaagatgatagacatgttaacttgcttcactatcaaccattttactatctacatatacatgtatctcttaacatcatgttgtatgccttaaatataaacaataaaatttactttttaaaatttttttatttgagacagggtctgtcactcagactggaatgcaggggcatgatcatagctgactgtggcctccatctcgggggcccaagcgatcctcccaccccaacctccccagtagctgtgactacaggcacacaacaccgtgcccagctaattattttgaaatttttagtagttttttgaaattttaaaggtctcgttgtgttgcacagggtggtcttgaactcctgggctcaagcaatcctccttccttggcctcctaaagttctgggattataggtgtgagtcaccatgcctggccaaaatttacttttttcaaatgaggcaataagtatcacagctgaggttcaaactcaggcctgccttaccacaaagtctgtgctctaattaaatactacttattctgccttatttatttatttatttatttatttattttttttttttttttttttttttttttttttttgagacggagtctcactctgtcacccaggctggagtgcagtggcttgatctcggctcactgcaagctccacctcccgggttcacgccattctcctgcctcagcctcccgagtagctgggactataggcgcccaccacgacgcccggctaattttttgtatttttagtagagacggggtttcaccaggttagccaggatggtctcgatctcctgaccttgtgatccgcccgcctcggcctcccaaagtgctgggattacaggcgtgagccactgtgcccagccaattctgccttatttaaagcagtaaatatttgactgtaaactacctattgtatacagctctgtctcttcctgatgtccaaactgtttattaagcaaaaataagttctataccatggtggtatataaaagaaggaaaatgcgaaaagcagacccagtccagaggagttaccatctttattgggaagataagacttttacgaatgaaataattagggaaaaaaacaaagcggccacatttattaccaaaagcctcggggcagggtccaaatcttttatgagaagccccattatttggaatccaaactaagtaaaaatgtgaacaactgagatttggtcccttccttgtcatccctgtactgccacccaagaagatccttttatactattttaagagaaattgaaaataataaacaagtagattgtcctcaggaatttaatatttcttaacggaattgaacagagttttccagggcaatctcttccaccattcgtttccatagtattgtatagcaaatggttgtttagcccaacaaactaaaaatgtcaaccacagccttgagaccctctaaattctataaagtgaaacgtctcactttgaaatatgcacattgatcccagagacgcaaattctctcacttttaaggctattgtgaaactaactccagcttcatctttatggagctgtttcaatgtataatttaagaaatcacttccaaatactgaaaaatccgtgaaaatcctgcataaattatgcatgtttgcgagtcccctccctcatgttgtgacagatctgagctatgtggtggtggcagtggtgtgtgtgtgtgcgcgcgcacgcgtgtatgtgcatgcacatgcacacatggtgtggttgagatggaaacctttctcgcaagcttattgaatatttccacctcctacagagcactctgaagaaatgcactttttcaacattcagatgaatgtgaatcagaacggcagttctcccaggactcatcttttatattgaacgtagggtcactgacaggattgaaatggatccaagttaccttgattagctgatttttaaaagattagaagcagccagctatggaccggaggaaggagaactgattctagtgtctgctctaccacaaaaaagccatgagaattttaacatgttacttcaaccctctaaaccacagtttccttttgtgtaaaatgagggataaaccagatagtctttaggtggaattcatgaactgccagcctgcagacgtatttgtttagctaagcttaaccccaagatcttttttatactggagcactataaagaggttttatggcatgactctcaaattttagtgcatgacagactctcccagagaacctacacctgggctgtacccccagaacttctgacctaattggtttgaggcagggctcaggaatctacatttttttttttttttttgacacggagtctcactctgtcacacaggctggagtgcagtggcgtgatctcagctcactgcaactccgcctcccaggtttaagtgattctcctgcctcagcctcttgattagttgggattacaggtgtgtaccaccatgcctggctaattttttttggtatttttagtagagatggggtttcatcatattggtcaggctggtctcaaactcctgaccttgtgatctgcctgcctcagcctcccaaaatgctgggattacaggcgtgagccaccatgcccggccaggaatctgaattttcaacaggggctttcaagggattccaaggtacttggtccatggaccacactttgagcatagtgggttagttgaaattcttggtgatctaagtgctcacatcacaacttagcagttacaaacttcattgagtggaatccaaaatctgacttaaatgaaccggaatcacacactagaggagagcacatgtgctggatgtatccatggagtgcagcagttctaatgctgccactttctgccactcacaagcggtgaatcctgggtaatccgtttttccatctggaaaaataagggcagcaggatcatctcacaggattctcaagaggatgagaaatctcaggggggttacctagcatgattcttggcacagagaagatcctcatgccctgttatgtcttctcctggccccattcccttcaggggcactgcactgcatggagctggcctgcccaagaagcacgaggacaccaggtgtgcacatagcttgcctctcgtgacctcacctgtgcaggcttgccctcagcttcccgaaagagcaaaatgatcttaatttgtcctgtttggggagggagtggactgcaaccacctgcactcatttcaaaacagaccactcactgtagaaactgaaaagaaaacacatttattactcctctcccacaatactacttcacctcccctgccctcaaagccttagtaagtgggcaaattcctaaagtggaaattatatgataaactttggccaagccataaaacacagccgggactaaggtcacaaaacagttactgatgtatgttccctgatcaaagccactccatgacactcacttttaggagtcaaggggactacagaaacttacaggaagaaaaaaaagcaactttgaagataaattagagaagcagtctactcatggtcaaaagacattactctttgagctttatatattaatgaagattaaattcgaagtttataagctctttgtgattattaataattcaattacaaggaggtacagaagccattcaaattaatattggcgatgaagggctaaagaatgctcagcacccctgctctccaccaaaaaacccactccatgaattaattgtggtcacgtaaattatagatgcttaatcatcatctgggttgaactctttgcaaatggtatcccctttcttgacatttttccaaaaggaaattttttagttatatgccaatgcattcaagatcaccaaaagtgctgttaataacacagaagaccgggtgcggtggctcacgcctgtaatcccagcactttgggaggccaaggtgggtgggtcacctgaggtctggagttcgagaccagcctgaccaacatggagaaaccctgtttcttctaaaaatacaaaattagccgagcgtggtggcgcatgcctctaatcccagctactcaggaggctaaggcaagagaatcgcttgaacctgggaggctgaggttgcggtgagccgagattgtgccattgcagtccagcccgggcaacaagagcaaaactccaacaaaaaaaaaaaaaagaaagaaagaaaaaaaagaaaaatgaaaaacagaaaaatgaaatggaattgggaccagaataggcttcaggatttccagagtgcagtcaaaggatccactgtgtagcatgcaaaattttatgacttttgcctatgcatttttcagggcaataaatatcgtggaggtatatttactgttttctacttgaaaagcaaatttgtggcaagggtgctgggcacaaataaaattagttaagtgatagatagacacaggaaaggtcaattgctagacaacagtatatgaaaccactcttgctcaaatggtaaaagaggtgaagaggtgtcaggagagcaacttcattatcctctaagtgcctttttccatcccagtgggaaaaaaatgcaaacactcacgcacacatactatggtggcaaatgcaaaatcgaataccaattgctttcttttgatagttttgatacgtgtattagtctgttctcacactgctaataaagatgggtaatttacgaagggaaagggtttaattgactcacagttcggcgtagctggggaggcctcaggaaacttaaaatcatggcggaaagggaagcaaacaggtccttctcacatggtggtggtaagaagtgcagagtgaagaggggcaaaagccccttataaaaccatcagatctcatgagaactcactcactatcatgataacagcatgaaggtaactacccctatgattcaattacctcccaccagatccctcccatgacacatggggattatgggaactaaaattcagatgagatttcggtggggacactgccaaaccgtatcaatatgtttcactagaaaccaaagaaaggctcagaaaaccaagaacagacacatgttgaccttaccttaagcctgaatgataattttcaaacacaaaccatgtagtattttagaaccattgtaaaatatttgattctgtgagaaattaagtgctggtgtttctgtgtggaagtgaaatctctctggatacccctccttgattcaatgtgggcatcctcatgaaacaataaactgatggtagcacgtgatacaagacaaaatgacaggagagtgggaattgcagtaagtccctccttttccactgtaactgctagtggaaaccctcttggtttgagggcattggttgatcctcagtgtggttctaaccagtgttgtatgggaatatataatctgtgtgaacaaacagatgaaaactctggcaaacttcaggatctccatccccaaaggtattgatggctatgtgcaaattaacagctatactagtgcaaattaaaagcacactagtttaacacagggcctctacatcttttttaaaaagtcactttgggaggctgaagtgggaggactgcatgagcctaggagttcaagatcagtctgggcaacataatgagtccctgactccaaaataatttaaacatttcctgggcatggtggtgtctgcctgtagtcctagctactcaggagactgagcatggaagattgcttgagcccagtaggtcaagactgcactaagccgtaatcacgccactgcactccagcctgagtgacagagcaagaccctatctcaaaagaaaagaagagatgaaagaaaagaaaagagaaaggaaaggaaaggaaaggaaaggaaaggaaaggaaaggaaaggaaaggaaaggaaaggaaaggaaaggaaaggaaaggaaaggaaggaaaggaaagaaaaggaaaggagggaagaaaggcagaaagcaaggaaggaaggaaggaaggaaggaaggaaggaaggaaggaaggaaggaaggaaggaaataaatgtcttttggaccagtgtagaccagcccagtggtttagtgccttatcaggaaagttttaaggtaaaaaggttataattcttctcatcccctcccacccaggtgggtcacaaaactattctcatcttcaaaaataactaggtttgattaattaaatatatgaaacataacagataagctctatactgatcttagcagattatagaagagctttcaggttattatcgtttaaaagtcatagtagtggatgaactaagaagagatcaattcaaaatatacaactgaaggcaaaagaattaactgattgttgtctgagctgtcccaggtttcccgactctctgggatccccctcctgccttcccaagccctcttccctgctgtagtatctcctccatgcttcctcatctgctccatggcttcacaaagctgctttacagtgaggtcaaaacaggctgacaccacagattctcaccacctggaatttttgtttgtctgagacaggatcttgctctgttgcccaggctagggtgcagtggtgagatcacagctcactgcagccttgacctctccagctcaatcaatcctcccatctcagcctcctaagtagctgggaccacagcccatgtcaccatgcccagctaatttttgtattttttatagagacagggtttcattgtgttgcccaggctggtctggaacccctggcctcaagtgattcacctgtcttggcctcccaaagtattgggattacaggcatgagccaccacacccagccctcactacctggatttggcttttgttgccacctctcagataacccttgtttccatgatctatgagccagtttaaccaaacccagagttaattatcatatcctaagacaactaatgaaaagcactgggcttagtataaagcacacccactcactccccaccatctctttcccctggctcccaccatataaaatgatccaattttgacataaaatttctaaaataaaaccttggttgaaagccaagtctttgggaacctgtactttcacgttaggaggttacagacttattccaacgataagtgctttttgcacacaagtggccttttggaattgatttctgagttctgggacacacacaggcttttgaatgttctcaatagtggtaagccttaaaccttctgaagacagattgtatttctttggaatgagccaaaagtgtttaggagacaaatctggtgagcgtccagctgggaaataccatttgggtcaaagctataaagtatcaagagtgattttctggtgtggtttgaaaattagctctaaaagtcattccaaaagaggcattccagaaatgtatatggcaataacaccatcaatggaataaaaaatgttttatcccctaaattgactactagatggataatgctatttcatgcctccattcctttaaatatgctatttggtcccttcccctacagtgcaaagccctcaccctcactctatctccccaaatatctaatttgttttcttccatcaaaatatatgtttctaggaagccttctctgaatctccaatctgattctgatgccctcattcatgctctctcatcaccaccccccactcccttcctcccctctaacatgcggggcaatgcttgcttaaaggacattgcaaacaatggttttcattttctgcccccaccaccaaactgtcagctacttgaaaataatggctatattttactttacttgacagagcaatggcttcatacagtgcttcagaaatgcttgttgctcaaataaatccatttgaaaaattaacctccttgctctgtagttttacctcacatgatctgacatacttgtcatctgcagttcaatgtcaacccaggagtaattttacaagaaagattgtgatagtgttgaccctcgacgcttatattagtttttcaacaataatctaaatgctggtagagaaagaaggctaatacacaaaacagtaacatgagctacggaagtgagccaggactttaacaagaaaacataactgaattagtcttcaaaatgacattggtaacttaaagaaatcatttatctcagaataaagaacttaagcaaatgtacacatgagctatttaggcccatattagagctatttctctatcaatgaaaaatacacccagaaaagcttactatgaagcacaattctcagtatgtaaatctattatcttgcattaaaaataccacacaaatagcctaccgcccagcaattcctttgaggctatatagccaacagaaataagtgtttgtttccatcaaaatacatacatatgagaatgttcatagaaactttattcataaatagtcccaaactggagacacgcataatgttcacccacagtagaacgtgtaaacacactctggcatattcataaaacgaatactgctagcaagagcaaagaataagccacagataaccacaacctcatggatcctcacagacataatggcaagttacagaagttacagacaaaagactgtatacagtagggttccatgtgtatgaaatcaaaaaacatgcaaaagaaattactgactgagagaatgcatgaggggtattattgggtgctagaaatattctatattttgaatgaacctggtggtaattacatgggtatagacatacacaaaaattcatacggttgcacatttaagagttggcattttatgtaagcttatactttaatgaaattttaaataaatatgtttagatatctcagtctcatagaagatttaatcctaaaatagtagcagaggggcttggaggtgaagaagtagttaatgagcaatcctggtggggttagggagagaggggtagagacccttttggataagctgagtagctatgcaaaaaagatgatgtcagggcgttggtatcccaagtttgacccctgaaaggagaggggccctgaatactgaggttttaatgtttgcttcctggggcacagtagcaaaatctttggaactgatcattcagggaatcagttactacataatatgttaaggcttatatgaggacacttaatcctgattttttttaaaaagatgaccatatatctggccgggcatgatagcttgcacctataatcccagcactttgggaggccgaggtgggtggatcacctgaggtcaggagtttgagaccagcctggctaacatggtgaaaccctgtctctactaaaaatagaaaaattagctgagcgtggtggcggatgcctgtaatcccagctacttgggaggctgaggcaggagaatcgcttgaacccaggacgcggaggctacagcgagccgtgattgtgccactgcataccagcctgggcaatagagcaagactctgtctcaaaataaaaaaaaaaaaaaaagaccatatatccaagggcccactcagcagagacatcaggtatatcacaaagtaggaaaataaagtgttagtaggaaaagaagttgtcagatgtgaaatgaagttagaatgagttaatgattttagaggtaaagatgatgtggggctcacagtagaccacaagcaattttaaatatgtcagctggatacaaagaacatacataaaaggggagaataatatagacactagacagggcaaattaatccttgcatgaaagaaaatgctggggtgtccctcagttgggttgtggggtcctcctaatcattgcctggcctggctatctaatccatggagggtcagatgagacagagtgagatccacataaatgtctccatacccactacccatgaccagtggcctggtgggtacataataaagaatttaaatttaaggactaaacagtgaagttagccactagggtttctttctccaccaaacttagaaagtccctaaggggagctacgtattgtccagaaatttaacaaaaatgtaaataaggaaacacacagtgctaatgcaggtttcatttcaaagaaaagaattcctgaccacaataattaagagtgaggttgtcttaactcagggtctaaaatcttttgaaaagtatctatttgaaagaaggcaatggaatgcatgtcttctatctgctctgtccccaggatgtacaggtgtccctttgctgatgaaaggtgtaggtggcatgcaataaatggaaatgtcatataccctgcttcctgggtaaggtggccagaattagtatacagcaataaagggtgcccagtgaaatgtgaatgtctggcaaacttttgctcagttatttctgaacaaccacattctggctttaactaaaaccacattgttacgctcatattttacacaaatatttattccaagtggttacaaaatagaaactgagtaataagttcatgactttctccccatcctccatctgcaggctttcttcagccagtaagcacatcatctctttggaatccagaggtcacattcaactatgtaaaagtacttcttatctgaacttttctccctaaaattcataacttatctaaattaatgaaaaaaaaaagactgggtcatatttctgtttgaggattatgaggtggagtagggaagagatgtccttctctggatgacctatataggaataataaactaaaaattcccaggaaagcccagaaaggtttctttacaaatgtatcacagctgcgtgactcacgcttttagttttgacctaatggtacttgtttgaaagcagtgattatcaccagaacatagactccacaaaggctagctttggtttggggtatccccgttcactctcagaatagtccagaaataaagttaacaactacctgtggcgacagtgtgctgtaccacactgataatgccaactcatgttaaattttccctctgaccttgtaatggaggtaggatgggtattgttattatgttaaacatgaagaaacagaaggccagagctggaaaccagcagacctcagagtggacccctagaaatgactccaagtgacatgcctgtcccaccatcagtttccaggccatggccccaagaagaagatgttactatgttgagttaaaaagcaaatgctcggccaggcacggtggctcatgcctgtaatcctagcacttcaagaggccgaggcagacagatcatgaggtcaggagtttgagaccagcctggccaatatggtgaaatcccatctctactaaaaacacaaaaattggccgggcactgggggggtgcacctgtagtcccagctactcgggaggctgaggcagaagaattgcttgaacccaggaggcagaggttgcactgagccgagattgcaccattgcactccagcctcggcgacagagcaagactctgtctcaaaaacaaacaaacaaacaaacaaacaaaaaaacaaaacaaaaaaagatccttatccattacttatgtctgtcttcattactgattacaggagcatattttaatgattgtttggcagagggtgatcaagtagcaaaagttctggaactcagatacctaactcaaaacgaaacatcaaaaatgaaaaaaaaaaaatctagacagtggagcaaccaggagtatcatggtagacagttacaaaagaaaagggtaacacgaacatgaaaaagtcagttcccctccacattttagtaactagaccgggcaaaacaccatttatcctagatgcgtaatctccacaacaaaatgttctacattttggcccctaatctctacccttgaatgggtagaatgactcttcgtctttccaaagcactgcaatagaacagaatgccaggggaaatatccatacaagacagcatttatttggaccattgtacctttagtgagtgacagagaaaagctagaaaataaattaccacttaaacaaattgttttgttcatatgtctgctcccccaatatttctcccagagcaccatgggttactgtaggtgttatcaatgatgaactgggacaggagtcattaatgtgaccatggacaaggtagcaaagctataatgaagagatctccatggtgtaatgactgtggtttcctgtctaagatagctagaagtgtgttactaattcagagagggtcagcactccacatcaacacccagaggcttcaagatgccccacagagaattccacattgctggatgctggcactgactaatcaaagcatctcacatgcccattcccattttgcctgagtgataatatgagaaaagaacaaaggataagagaggaaagaaatgacctgagagtcatcctcgtccttccccctctcttttccccttttgcacccctcaggatgcaatctatccccaaccccagctgagacttcctccaaaatattgctctaatccatacccatctgccatcgccactgtcacctcccaattcaaatcagcaggagcacccatttcacttggaaggagacctccagtgatggggatcctttatccaacatacacaattaatcccactgctaaaatcttccttacaaactacactaacagcccttcagttagtttcctgtttttcaacgttgggctctcttccaacttaatatatggaaatcccactcggaaagtttgcagaagaacaactattctcattaccatctgggttctgacccagtggtctgtactttaacccagatggtcttttatgagggaaggtttgtttgttcgggtgttggtggtttttttttttttttttttttttttttttttttccagtgtgagttcttcagtggaaacttcgctctggttttccaacactgttttcacagcagctggagggcagaggctgctgtcctctctcttgtaaacaaaaaggccaagccgcagtccccggccaccaggacaaacacacactcccgctgcgagggcacccccatgcagcgtgagcacggcagggcagtggtggcggaggaagccgttgtctgctttcttattactgcgctgtcattcatgcagaagtcagcccacagatgcatcagtggcttcctttcaaaagggccattttcttgaatttattgactgtgcttataagcttcttgtgtaaagatgctttgcacaagcttcaagaaagagaacttatttatacaaacccatttaaatactgcctctgtagaaaaatgtgtacggacatcaaaatattcaaaaacaactatctctttatatgaagtcagcagcatggggggttttaaatgctttatttactgtttatatttttaagattatcaatgccaactctactaattcagaaagtacagtaattcagacagtaggagggctgtaactaatctttgcactgcctatgaacaaaggattgctaagcaaattataatgcatgagtaaggttgttccaagaatagataaatatttggcaagaactattttaggtctattctagtactttggagctacccactaatttataaatacttgatctactaattacaacacttcttatctattcatttaaccaggtctcaaaggggcaaggcaagcagcatggagcttgatcccattggtgatgtatgttggtcatttgttcttgaaaaagtactttctgctgggcatggtggctcatggctgtaatcccatgggagatccctccctctttgggaggccaaggcaggcagatcacttgaggtcaggagttcaagaccagcctggccaacatggcgaaaccccagttctactaaaaaaaaaaaaattagccaggcttggtggcaggcaggcaggcacctataatcccagctactcagaaggctgaggcacgagaatcacttgaatctgggaggcggaggttgcggtgggctgagatcacaccacagcacttcagcctgggtgtcagagcaagactgaaaaaaaaggcaggcagaaagaaagaaaggagggagagaaggagggagggagggaaaaagtactttctttcagaaactaaactaaatttcattttttacagtttagattttttttccagattttgtcagaatgagatttccctcaatgattagttttctattgctgctgtaataaattcccataaacacagcaacttaaaacaacacccatgttttagctcacagttctgtaggtcacaagtctggggacatagtgtggctgctttctctgctcagtgtctcacaaggtgtcagtcggccacgtccttgtctagagccccaggtcttcttaggagcacacgtttgtggcagaattcagttccttgcgggtgtaagactgacatatctgtttccttcctgcccatcagtcagggtcactcacagctaccacaggacacttgcgtccttgcctacgctcccttcccccaatcgtcaaagccatcaaagaagatgcttcctcatggactgactctttagctggaaaaaaagtgtctagccccttttaagggctcaccagattatggtagttccacctaagataatctccctattttaaggccaactatttagggctttaattattattacttttttttttgagacggagtcttgctgtgtcacccaggctggagtgcagtggcacaatctcggctcactgcagcccctgcctcctgggttcaagtgattctcctgcctcagcctcccgagtacctgagattacaggggtgcgccaccacacccagttaattttttaaaaatatttttggtggagacggggtttcaccatgttggccaggtcttgaactcctgacctcaagtgatctgctcaactcagcctcccaaagtgctgggattacaggcgtgagccaccatgcctggctagggctttaattatatttgcaaaaatattttcagagcagcacctacattaatgttagtttagataaacagatgtaaatataccatgatatgaaaatcttagggactatagagttctgcctaccattccttcccattattcaaaattaatattttttacaagataaaaaaccaatttaaatttgttccccagcaccattctcctgctcttgacttaaatgttgttgacacttcttcaaggccaataaattagtttcatttcatggtttctctctcccgaacaagatttttagtcttcctgaaggcaactaacaagacctgtcttccttttctacataagtaacaccagccagggaaggttagaagaaggagtcatgaataacagcataaactatcagaataaaaactatgagaccaggcattgtgactcacacctgtaattccaacactttaggaggctgaggtgggaggattgttcgagtccaggagtttgagaccagcctgggcaacgtggtgagatcctgcctttataaaaaatattaaagttagatgggtgtggtggcatgtgtctgtggtcccacctactcaagaggctgaggtgagaagattgcttgagcccaggaggttggcgctacagtgagcagtgttcacaccactgcactccagcctgggagacagacagatatcttttcttaaataatatttttaaaaaaagagagaaaatccaaatggcaacatggacgctcagtagtaacagccccaatgtcacaggtatgttctaaacatcatccaacacttacaataccctccctggccttcaacaacaacaacaaaatagaggcaatcctacaaagaagatcttacattatcagcactaaaaagttaaacaccattttaatagaatcttttaggggaatctaatgaattaatgtatatgtgtttactgcaaagggctacacaaatagatatgtcattgtttctagagctaacaataatttttaagcagaggcagcgttcttaggtatgatgacacatcctacctggtcctccatactctgaatttatcaacgttggctgattttgtttattatctctctgactaccctgtttctccctcctattggaatcttcagagagttgtagttgagaaatggaaaactcacaaacccactatttacgatgcaacaaatattgactgagcccccacaatatgcaaggcactgttctgggtgctaaagctagatagattaacaagacagagaactatcctactttcaggaagcccacatgctacagggaaagacaaatgacaacccagtggcaatgtgggctagagatgtggcaactggccgagcacagtggctcacacctgtcatcccagcactttgggagactgaggcaggtggatgacctgaggtcagaagctccagaccagcctggcgaatatggcaaaaccctgtctttactaaaaatacaaaaattagctgggtgtggtagtgggtgcctataatcccagctacttgggaggctgaggcaggagaatcgcttgaacctggggtgcagggtgaggtggaggctgaagtgagccgcaatcatgccactgcactccagcctgggtgatagagtgaaactccgtctcaaaaacaaaacaaaacaaaacaaaaaaaaaaaacaaagaaaagaaaagaaaagagatgtggcaattaaggaacgcctccctcatgactgactttgagcaaaaggggaagataccttgggaagagtggtccagacaaaagccctgaggccagagtgttgggagaggatgggaaggcagcaggaaacctggggggctgaagcgggttgaacaagcatctggtgaacatgatgtggattttttccttgtgtagacaggaagccgagtgccatgatctgactggacacaccaaaaagcacattctgaaggcctgatggagaataactagaggaaggagtggagggagagagactggacaggatttgaaagagtctctgattagaagttggctgggcaaatctctcccgaactcaaaatgaggaggaaacattaacagtttccaccacctcaaaaatgatcaacaacccgaaaagcttggaaccaggtgcagacaggctaccagacttgtaacacagtcaggaacgctacggacgggcaggcatctcacagctctgactctccaagtgtaatcctgaggtaaggtctttcagatggctgcttaagaggtctttcagatggctgcttaagagaaagagttgcccacctgcctggctccccaagaatgatgaagaaactctgtggcgactctttgaaacttttgaacaccgaaccgctaacaaaggaagtaataaaaagagcccatacataccaaaccaaatctgagggatctctgaataaatttggaacactcaccaagcctgtgctgctcactcattctgccagctctcaaaggcacaagccacagacctctttccacgacttcccttttgctatgcacacatttgccctttgagtttgtttgttttccctgatgatttcagagagaaaacctctagcgggcaccaatcctgcctgttaatgccttgtagttcggtccctaacagagaacttcacagcactgagcatagacagtagaatatctgcatattgggatctctggaatgggacccctggaatgtaaagagttcctagtgtggcaaaatagccacaaggaaaggtgcattaccactgtgtctacatgttcagggtgctctaagtagaaggagatgctgagcccaagagatgaagaactgggaggaaaaaaatgaagagattactaaaagacacatattagagaaacctcaacaaaaaagcttaaaaaaaaaactgttcattagagctacttattcttagctttataaactgtacaaagatgaagcaatcggaagggagtaactacattgatttcatttgcttcagttaaatcaaaatttatgtgaacttaagataatatcaattgttagctctttggctaatttatcacttttatggtttaaacaaatctgaaatgttaaagtgactcacaaatcacttttctatagcattgaattaagttatcactttgttttctccctgtgcactgttcttcaacttcaataatataatttgatgctgtattcttatttcactgattttggactggagatttcttgttttacataaaccctagtgtattcttgacttttttttactaaggaaagcggtgactcctgagtgttaggcaattcctttaatagagttactaaaaattttattactgtatgtaaccctaagtattctgagtgaaaatataaagaaactttccaagtgaaaataaaaagcaccttgcttaactattcttttcttttttttttttttttttttgagacgaagtctcgctctgtcgcccaggctggagtgcagtggtgtgatttcagctcactgcaacctctgcctcctgggttcaagcgattctcctgcctcagcctcccgagtagctgggattacaggcatgcaccaccacgcctggctaagtttttgtacttttagcagagaggggttttgacatgttgaccaactgaggagttgttctcaaactcctaatcttgagtgatccacccgcctcaggctcccaaagtgctgggattacaggcgtgagccaccgcacctggaattttactcttcttttaatgaagaataaatttaggtctaaaaaataagaccaaagcccattaatccagactatctctatgtggccacatctcccagtaggtgtattcaatacccagctttcaataaagagaggaacttcaaattaacaatgagatttaaattctagagaaagctatacattggtgctaggctcattttttaaaaacataccggaccacttcgtgggttcttatttaacagcctgtaaaatgcatccccatagcatggaaacatttgccaagtgttgataggacagtcagtcataaatcttaaggttgccacaaccaaatagaacctgctcatgttgagtataaaacaccatcacatctcaaaatgacttttcttaattaacaattaggctttgcattttcaatgtgatcacaactccagtgaaattaatgcaaaccaaactagtttcagaaatgcaaatttgagccagtgtagggcacaagcagcactttttggaagattcaggacctgagatgcaaggagaaaatgttggtagaaacctcttcccactcaccctacttgaattcgtattctccaaggaacttatggtcgaaaatttctctccaccttaagctatctctgaggttgtatctttagcaaattccttatgggagttggaagcaaaggaacatgaaataagaaagtactatgaacggaatgattgatttttatcttcaaacctgctcgggctggtcctgttttgatggccaacttttctcagacactaacctggagtcactaaaaagaaaaaatttctttcagtgaccagacactgggaaaaccccagatcctccaactccttgcacagcctcccaagatgcagatcaatggcaagggttggggagaactggcattctacctgcattctatctgcgcaggcactggccaattacttggagaatgttccagacactggcacagggcagtgcaggcacttcgtggctcacagcctagcacagcaggtaaaagtttacgagaagagcatggctgcacagctcatttaccaaagtgaatgaaggagaaaagtgcttaagtttactcagggtatcaaaatcagagtcaaatcttaggctctgatgtacgttaaagctcaattttaaaatgctctatgtttaagttgctacctcttaacataacaggaagccatccagtagtcagtttaaattaagaagactcattcatgtaatatcaccacataagggaggctgggagagagtaggtgaaggatacggctggggatgtgggtttaaatactggctgttggtcaggtgctgtggctcatgcctataatcctagaactttgagaggcctaggcggaaggatcgcttggacccaggagtttgagaccagcctgggcaacatagcaaaatctcgtctctacaaaaaataccaaaattagctgagcatggtggcaggtgcctgtagttccagctactcaggagactgaagtgggaggatcacctgagcctggaaagttgaggctgtggtgagccgtaatggtgccattgcactccagcctgagcaacagagtgagatcctgtcacaaataaataaatacatacatacatattggctcttcaatcaacattagagcaaatactctttgccttaattttcccactggccaaacaaggctaatattagtttctctttcacactgttatttttgaggaataattcggttattgcatataaaacactgagtagcatcacataattaacctctaacaaatattacttgttattattactccaaaaggaaaatcaaattttctaaataagagattctcaaaatttagagcacacaaggctcactaaattagggaggtcattacaaagtgtagattcctgggcccagtccaagtgattctgagtaggtctagagtaaggcccagagcctgcagttttaataattatctcaggtgattctgatgcaaaagacgctcagaccacactttgagaaccactgctgtaaaggtaaccacagcatcagcaaagacagtggtagctgctaggaacagagaggggtcaggatcggccgggcagagaggaaaacagtgcaggcctgagcttcccacctccctccacctccagcaccctcccaaccccaatgtcaagagaggcctgcaaggtgcagcaggaacctcttcccatgctgcccccagggaagtctactccaatgcgaagaaggggatagtagaggcaatggacgcaaccgctgcctggtaatgccaaacactgaggtggtccctgtggacagatgagcacaggctcctgccggtccaacccagaattggacaagtggccacacagagacagtctagggggctctcctctaaaatccagtctgaggtgctcattcttttataactacttaaataacaactaaaaataaaaaatctgacaggtgcagtggctgatgcctgtcatcccagctactcaggaagctgaggcaggaggatcaatggggccaggagtttgagaccagcctgggccacacagctagacccctcctctcaaaaaaaaaaaaaaaaaaactattttattttaaccacaactctgtgaaatatctccctttttcagaggaaaacaaatgaaggttttaaagagaagttaagtaacatacctaagccatagcagaggcaaaacctagcaagtcccattggctctagctctaaaatacaaaaggaattcctccccccacccccatcccactgcctcacctggctcctgcgtcggctaagccacattactatggtctggagtacatcaaaagccagcgaaggggtctccttgcttccactccactgcccctgccccccactatttgtgtttatttctgcttccatgttttttgtctgtctgcctccactcaattacacgctccttgagaacaaagacccttaagtgttcagttcattcctgtggccccagacctcataatggagcctgcagtactcaatagctcttttaaactgaccaactccaaagtccattctgtttgctaactgttcctctcatggggaagaacaacttggggaaagccctgttgagcaatcctttgcaaacggccaagtcatactggtatcttaggacagtcacccactcagccactcaaaagaaaaaagttcagaacaggaagtcagttttcagcatcaacatttatacaaaagagatccatctgggcgagatgttagctactcacatttgctgtccatgcctaaggacaacaggtgccatgccctgccagaagagccccactgctttctcacctacacggtcatgtgacagcaactatgccaaaaaaacaaatgcacttgcttatgtggaaaatgggaaaaagcaaatgatcccttagaacccagactggaggcgggcacagtggctcacgcctataattccagcactttgagaggccaagagtttgataccagcctggccaacatggtgaaacactgggtctactaaaaatacaaaatattagctgggtgtggtggtatgagcctgtaatcccagctactcgggaggctgaggcacgagaatcacttgagcccaggaggcagaggctgttatgagcagagattgcaccactgcactccagcctaggcgacagagcgagactccgcctaaaaaaaaagagaaaagaagaaaagaacccagactgggtctccctctcttcctatagagaaagttatctcttcctgcccttgaagacagaagcaattaagaaaaggagagtaattctgtttgtagaactgtctatagcagacaaggaaaaactttcattttaaactaattccagagaactgagacaatctgacagctgggcacagcatctatagaaccagatttcacaaaaaaagttggagaagaaggaaaagccaactcagctgaagcgatatctcgacacattccagcatcctagaagatgagtgcttacacatattcacctgaacctatgccttccctgacagcaaaatgctcaggaaccacttgtgcctctccagtggctgctgccataatgctaaggccggcaagcctaagagtaagacccacagatccagtgctggggaatgcagttcccacttgcataaacactgcccacaacctgacttccttgaagtcttgggcattggcacatgcttcctcatcttgcttgcatttggcaggatctctctttttcatcttttgttttgtggaaagatgcaaaccccaagtaactgcccagtttgcatcgttctaggcaccgtgcatggaggaaaaactctggaaatcactacagaggacccttacatgcaaactgcaaaattaaggtggccttcaagtgtcaacaggctctacaggtgatgacagaactaataatcaccactgctccaacacaagagcctatgcagccaggtactagacttgcactctttctaatcttcgtaccaaccatgtgcaaatggtgttcattatgcctgtttacagatgagaaaaacaaggcaccaggaggcttaacagccttcccaaggtccatacacggaatggaagaaggtttcaaactcagttctccagacttcgatgtcttttttttttttttagatggaccctcgctctgtcacccagactagatggagtacagtggcgcaatcttggctcactgcaacctccacatcccaggttcaagcaattcttgtgtctcagcctcccaagtagctgggactacaggtgcatgccaccacgcccagctaaattttatatttgtgaaatgccatataaagtgcatgatgtctgcaagcagttgtggttttcccgaccagcttgctgccactgagccagtggttactttgtccggctcattgccactggaccatttctgtacataaggtggttctcgtgtccagcctaccaccactggaccctctcccctgaattaagcccttaataaaatcccatgtatcttttgctggttctgagtctcttctttggccttttgaacttggcaactaccctactggagttattttcctttttttattttatttttattttttgagatggagtaagactctgtcacctaggctggagcgcagtggcatgatctcagctcactgcaacctccacctcccgggctcaagtgattctccggcctcagcctcctgagtagttgggattacaggcacataccaccacacccaactaatttttgtatttttagtggacacagcgtttcaccatgttggccaggctggtcttgaactcctgacctcaagtgatccaccctcctcggcctcccaaagtgctgggattactggcatgagccaccacacctagcctccaaatatctttttaagactcactaaatcttgagtctaataagggaatgggtcaggcttgtcatacagcagggcactgagcaagaagtctactaccatcagggtcaaaaacccagcatggcacctctgtgacactctccacgtccatatcagaaggcaattgtaagcacaggcttacatgttattcctgaccagaaagaaaagtttgtggctggcacacaacttttggcaaagacaagtgtctcacctataaaacatgttggcagctgcccacaggggctcctcctttctctggagttttcatctccctccctcacttcacttcatctcaatgtgaacagtggctaaggtaaacatggctcaggtctcttaggaagaaaagtattacataagtgcaaagaagaattactgccccaacttcggaagcctcccaaacacattataaactcttccttatgctattgtaaatattaaggtttgcattaaacattcaggagagcagctctgggtatataattagggagagcaaatatttgttcaaataagcctcaacgggacctcctcctttcaactagctaaaaaaaaaaaaaaaaaaaaaaaaatgttcaagcagatggatataggatacgaaggcttggcccaacatcttctcctagtcctgattactccactcctcagagacccatgaatcttcttaacaaagaagagtcttccaggcctcatacattagccaggcattttctcccaggccttccaagcttccagctccctgcagggcctcagctgacactcttcacaggcacctactttgcaaggcccttggtctcccgacaagacaagcaacacaagccagataaccactcaaagggaggcagtggagatggctctcattccctgccaggaggatcgccataacaaggtggctggaagaaccttccgtggcatgggaacagacagctgtagaccctgtatctaagtctcttcttcccggaattcttattccacagtggtgacagtgtcaagcagaaaaacaccacttttcactactttactgtcatcttataaatctcaatatttcagcttcacagacagcatcttagctgatttcacttcatgtgcaaaaaactcttccttccaaccagagggacatatgagttcagaacccaaattacattcattctttgagaggcagatgttttctgcagataacttgttgaacaatttttaaaaagaaagagagagaaaaagaaaggggaggagacatttctccatttttacatttctttctttttccttcctttagtaactcatatgattaaatgaacagggagctgtgatctgctctatttcatctcctgctggctgatcaagttttaaaaaaaaaggagaaatatgtatgcattcatactcacagctgcatggggatcaacagataaaaaaattactgatggaggaaacactagcatttctccaactataagaactaaacttgacacaagtctctggcccggcaggatacagccaggccagcctggatatttatgtacttgaaaagttaactaaaaatgcaaacacagtgaaggatgaacagagtcaaactataaatgcagatttcaaattccaccaaagtccagaaaagggatatgttaattgcctataatatgccttaagtttatcatctattgtagcaggaagtctcattgcttaaaccaacatttcccaaagcatattattacacagaacaacaccagaaagagaaaaggggttctgttcatatcaaatatgtttggcagtgataccacagcctcatctggagactcacaatccatgagtatagttaaggctgagaaaatcttctggaaggaaacccgtacaactgtaattaaccaggccttcccaaacacctttgattaggctatggaacctactaaaaatgtcctggttatcttgcggagaatacttcaggaaaatgagtaaagaagccaaagtgacaggttttatggccagcctagtggcccttgctcaagtccccatcccagcccttagttggccaatggcatccccaatggccaatggcttcttttcctagattgttgttagaggaaagagatgactcaaattaagatactgctaaaaagttacagagctagcaaagttcttactcttctctaagcaaataccatctctaaaagcggatgctagaactgtgctgcccaatgacacagccactagccacatatggctatttaaatttaaatttaattgaattttaaacagctccccatttgcccaagccacatttcaagtacttaatatctacatgtggctaatgcttaccacgtacatttagaatacgtcatcatcataagaagttctattgggagggctactctagaaagacaaacacatctcaggtttaaaagtaaaggcagcagatttggaaaatcttcattaaaaggacttggatcagctgggcacagttgctcacacctgtaatcccagcactttgggaggctgagccagatggatcacttgagtctaggagtttgagaacagcctgagcaacatggcaaagcccatctctataaaaaatacaaaaattagccagtcatggtgatacacgtctgtagtcccagctactagggagagtgaggcaggaggatcacttgagcctgggaggttgagactgcaatgagccatgatcatgccactagaccccagcctgggcaacagagcaagatactgtctccaaaagaaaaggactctagatcaggtttctgaagtcctatatttaaaagaaatgaccaagccaaatccagctacatccctggggcaacaagctgttttagtcaatctagatccatggagctagcaagtctaatttgctagagaaaatgctccttttacagtatcttgtacatctggcagtgacagaaatatatctaactgtcggatgcaatcagatacagccagagcatttttctaccagtgtaataagaacacccagcagacggtctgaatcctaaatctgaacaccacagaacatcagctatttggacgttaatttgcaactgagtaaatttagtgcagcattaataaatagtcacaggtccaaaaaatgctatatagaagatagggacaaatggcctaagatctgtgtccagagtcacgaagacaaactgagagagagtgtttttgcctaactatgggttctcaccatcaattctgcccttccgcccacttaaagatttcaccctcatttttttaagatcttaaaaatagatggagcttttattctggtcaatcagcagagttaatggttttccacaccccagcactttttgacatcagattctaacccactctagctcagcaacccagcaggggccaatcaatatttgttttcaatgcagaccatgtgttcaggcatctttgttcctctctgagagccagatcttctttagaaaagccagcatggtatgaggattctctaatccaatccaggattcctgctgataggcaacttgtctgtaattcatcaatgatatccccttgggctatggatttttctggattggtgacctgctgggtatgcggctggttttcaatatgcatggcgtgggtggggacacacactgaaaatgaaggacgtggttggcagggtagctgtacagtgctcttttctgaacaagcaatgtagagttgaggcatccccaggaaaagcttaccattttgcctctctgactttgtgtaggcttaactttttgcctaaatgacatctctttctctctctctggcaaactccttagtttactgcaaatttaagatccagttttcatgttgcttcttcaaagatgcccctatgtgtctaagctaatcatccattctctgcttaccatgtattatcatggcatataccatacagctttggagatacctatacatgccttcccaaccacctccttcacatttttatgagcttcattatcatcaactgccattctctaagtaacctgatgccaagtaaccaagtagggattcactgtctgctgaatgaataataaatgaacgaatggactgggtacctggaacaactgtggcagattatttccagatatgattatagcaatatttcttgtcctggtgctctcccagaaccttgccacttctcatcaagaaatggggtctactgcccttgcctttgaatccagacaggataaatataatacagtggaagcaagattgctggctccaaggctacttcccttggttccttctcttaagacgctcgcccttggaacccagccaccatatgaggaggaacagccgactacaggaagcggccacagaaaggtgttccaatggagagagccccaactaaagtctactgtcacctagcaccaactgctagatatgggtgagcaagccttcagatctgtgctgtccaatatggtagccactagtgggtatttatatctaaattaattaaataaaaacttcaattctataatggcactagttacattacagttgccctatggccatgtacggctagtggctgccatattggtcagtacagatatagcatattttcatcacacagaaagttctaccagacacaacgctgcttcagatgattttagccacagcctttgagctcttcagcagagaccctatacatcgtggaacaaagacaagtcatctgtgcaccgtcctatcttaatgcttggccccagaatccatcaacttaataaatggctgtttatgccagtaaattttggagtaatttgtaatgcagactcggtaaccagaaaaataatctttcatattagaattgctgagatcctttgcaaaactgctattcctacatttcttaaagcaggattggaaaggggaaagagaaaagtgacaggcagaggacaaacagaaattgttcaaatggctcattgtaacacaattgaacactcaatctctgtcattgaacatcttagcccattctgggccaagcagctaacatttttataggagaaacaactaaaatttccatcactatctcttgtaggtacaggccagcagagcactactttaattctggaacacttctctataatgttacccagctctcgcacacaatgagagataaagtgcaagatgccttgagttccttctccatgttacacccacaatacctttagcagtagcagtcgttaaacagggaataccatttgagggaagtggcacccctctcaaaatcctcaattgcaatgaagctcattaactagggaagagggagagtcttcttctgcatgtctggacaatttaaagtggagatgctcaaattgaggcattgattggcccttccccgtatggtatagttgtcatactatatatatatatatatacacactttatatatatatactttatatataatatactttatatatatataattttttttaacaaatcgtcataacacaccaaaaaggggtaattttcaattttcagtctgaccaacttggatatgttgatggatgtatatttagagttctactcctacctactttcagaaagaatttatatttatttacaataagtacataaggtacaataaacccccaaaatcatgaatatagaccagggttgagaacctctgtctctaaggggccagatttggctggtggtccatagtttactaatcttgatatatacctagggataagtggttaaagccactaactcaaacagaaattgctttgagaaagagatcaagaaagataaaaacaaactggctaaaccaaaaaatacaatttccattattcagtagaggtacagaatagtaaacagcctactctgtgcttggtctgaaacattagctcagatgagctcattctgatgatattttataagttaataagtactctgaacccccatggttttaatacaaagctgtctttcattggggctcacctctgctccccaaggaacccccaagatgcctcatccccagtgaatcaccctgactgagcagcctttccttccctgtaacatccttcatggttcagttttatgcttttgcaaaggatctatcttctttgagagaggaaacccactgccattcctgcatatggagaaattctgcattttattttactttttttttttttttttgagacggagtcttgctctgtcactaggctggagtgcagtggctcgatcttggctcactgcaacctccgcctcctgagttcaagcaattctcctgcctcagcctcctgagtagctgggattacaagtgcccaccaacatgcccggctaatttttgtatttttaatagagacgggatttcaccatgttggtcaggctgctcttgaactcctgacctcgtgatccacctgtctcagcctcccaaattgctgggattacaggtgtgagccaccacacccagcctattttacatttttaaaagacaaggtcttactctgttacccaggctggagtacagtggcacaatcatagctcactgcagcctcaaattcctgggctcaagcgactttcccacctcaggctcccgagtacactaagacaacaggtatgtgccaccaagtctggctaattttaaaaatactttgtaaagacaaggtctccaactcttgacctcaagtgatgctccctcctcacctcccaaagtgctgggattacaggcatgaactattgtgcccagcctaaaattctgcattttttaaggaggaatttgcctcttttggtagattcatgcctctgttggctgatcatgaggataagaaagcatacatatgaaggtgttctgtgcccatcacacaaatatagaagagctgaatacaggcaaggctgctgggcacttgttaccgagggctaacttgtaaaacccccaaatgagtcagaatgagtccattttggtaaaactgaaagagaaagattacagaagtcagcactgcattcctacttcagctcaattactccctaactgagtaaccttccccaaattagttaaccgttcttcacttgtaaaagcaaggtaataccactaacacgccagagttctgagaagggagggaacataagtcatgtataaacacaaagccagggatggagtaggcccgtgatcaatgttaatttactttccttcttcctttcagaaattccggaatgagaggctggcacatagaaaactaggagtgccatcatttataaagttggttgttttaattttttaatttagtgctttataggattatttagaaataatgcaatgccttactttagggctgaaaacaaccagattctgcacaaaacatctctcactgcctaaaccaataaaaatgtaatcaaataatggccgactaatatgtcaatatttgatttagattttaagaggggatgattctagttaaatttatgagacgctccacaacttaactcctacactccaatcattatagagactagaattgcagaaagggcaaatcttctagaaaatggtcccaagccctaactcagccacatactatttattacctttgtagatgcactcgatgtgatgaagcagtatgatctgaaatatagctgtgttttagttttagatattcttttgtactcctagtaccattctgatcagctcccacagaaacatatcctctaatatgcttaaaatttccactagaaggcaagtggtcagaaaagcacataaattttgaattttgtggggcttacacaaatttaatcctcaatgctatttcaatgcaaggagctaaaatgaaaggactatctcactgcaggggaggcagtgttagtttttaatctgtaggcctttcagcctgatttgtattgttttcttcctcctgcctctccttcctcacctcttcattcaatagttcacaaaaaaagttctttttacacctagaaagaaagaaagattctttaaaaacttaggaaaatcattttatttttcatagtcagaacataaacctcagagctgagctcagaacatctcataaagctaaaaggagatttttcactacttatttctgagtgtatatatatatatatgtatgtgcgtgtatatatatatatgtgtgtgtgtatatatatatctgtactttatacacacatacacacacacatacacacacacacagtttattttttcctgaataccgctccttttggattccttattcatccaagcccatgcgaggtaaactgttgcttgcgtttaatcaaatgtgatcctgttcctcctttatccaaagctaagttatacttttcaaagaaaagaaagtaataaatagatctgtgtgtataaaagacagatggaagggagggaagggcatcagcattaggaaacatgagccagtccatctcacctagacaaaacctttgcagcaaacatgcagatatctacagaggtttcaaaatgaacaatccctgactaccttgacaaaggctgagtttagaaaaatgcatagcatcatgggcatgtctcaaagccttgcagccaccccaaataagctgaaatcctgacaaacacaagggatgcctagagttgcaagccttggttccactttacacacctctctgtgtaaacgaaagttgcccgaggtgatctcttgtcttcctgcctaagaggcaatgtcttagctgtagctaggaactgtttaacttcttattggtcaataacatgccccagcaagcaataaatacgccctgacctcgcagctgccctttagcactgcacgcatcattgatcctgtgggtccttgggaaacaagccaatctgaataaagctaagtggaggccaagtaccatttcccaatgtcttcttgcaattccctagtagctgtaactagaaatagagcacctggcaaatcatcacatcatggatgtcagagttagattattatctccacgagagaaagaaaagagcaagagagactgagattctatctacacaaagaaagtgatgtgatccctaatgtagcaaaatctcccagtcttcacaattaaaactggggagcccaacatatgctagacgaggagagctgaaaagatagattaagagaaaaataattccccattgtcctatacgctttcttcattcgataataaaaatgcacttcattcataaaacacgtacaataaaatatacgatcaacccattcctgggaggttcctgacaggtgagtaacacaaagatagatgagtattattaactcttcagtaccagtagaatatcatcttatttggtgattttctcaattctctactgtacactaccctgtcattttttgtttgtttttgttttttgagacggtctcgctctgtcgctcaggctggagtgtaatgaggtgatcttggctcattgcaacttccacctcccaggttcaggcaattctcgtgcctcagcctctcatgcagctggttacaggcgtgtgccaccaggcctggctaatttttgtatttttagtagagacggggtttcgccatgttagccaggctggtcttggactcctgacctcaagtgatctgcctgcctcagcttcccaaagtgctgggattacaggcatgagtcaccgcgcccggcctccatccatttttttttttaattgaacatgcagtatctactggtttatttttaggtaatgtacacactctgctttactgacataaaatgtatattgtgaaatgtacaaaaataagaagaataagattaagatacattttaaaataatttttatcttatttattaattgtaagaaaaaatgtagtaaaaccaacataataggtcatgcttcgttatttttcaacccagtctatattttataaaccagtgattccaagaacaggtttgaaattcaggattttttttctcccaaaacttggaattaatgagggttacaactacgtaagaaagctaacaaagctatgtgaatccacatagaagtgcatttggggctacacttagaaaaccatgaccaagcttttaaatcccattggccaatttcataagaaaagattttattaaaatttactaatgcatcacagctatcttaatgtctatcagttgttcttgcaaacttatcaaaagaaattaaaccaatgaattcaaaaactattgagacccttgttgaaagacttttttagacaaagtaaaatagtcatttttcaatgctgttttaagctgagaagataggaaagttttaatggtgaatatataccatttttagcaacaaaaatctaacaatggaaatatttccaaataaattattttcaaaataattcttcctcagcataaactccatttaaaaaaacatatatttaatatattagttgttatctttacactaagaagatttaagttaaaaatggtttgtgggaggctgagacaggagaaccgcttgagcctgggaggcagaggttgcagtgagtcgagatagcaccattgcactctagcctgggcgacagacggcgactccgtctccaaaaaaaaaaaaaaaaaaaaaggcttgcctgtttcctgatgtctctttaatttccaacaagcccaagccattaagaaatgagatttacactgttggtgggaatgtaaactattacaatcactatggaaaacagtgtgaatatttttctttttttttttttttttttttgagacagagtcttgctctgtcacccaggttggagcgcagtggtgcgatctcagctcactgcaagctccacctcccagattcaccccattctcctgcctgagcctcctgagtagatgggactacaggcacccaccaccacgcccccctaatttttttgtatttttagtagagacggggtttcaccgtgtgagccaggatggtctcgatttcctgaactcgtgatccacccgcctcagcctcccaaagtgctgggattacaggcgtgagccactgcacccggcctggagatttctaaaagtaggactactatttgatccagcaatcccactcctagtatctacccagaggaaaagaagtcgtatgaaaaagatatttgcacacacatttatagatgcacaattcccaattgcaaaaatatggaaccagcacaaacgcccatcagtcaacgagtggataaaatgttttatatgtgtatatatatatatacacacacatatacacaccatggaatactagtcagccataacaagaaatgaaataatggcattcaaggaacctggatgaaattggaggacattattctaagtgaagaaactcaggaatggaaaaccaaacatcatatgttctcactcataagtggaagctaagctatgaggttgcaacggcataagaatgagaaaatggactttggggactcagaggaaagagtgggagagggatgaggaataaaagactacacattgggtatagttacactgctcggatgacgggtgcactgaaatctcagaaatcaccaccaaagaacttactcatgtaaccaaacaccacctgttccccaaaaacctattgaaataaaaaaaaattaaaaaaaaagaaattagatttttctaattcctggcaccattagaactttctgtataatgtttatgggaatctggattctttaagtcaagatccaaaatcaaagaagggaaatttaaaaaatcagtttcccttaaaagccaactagatgtatagcaagctcagattctgccaattgtatttcaaactcaaaaaatattcataggttttttatttaatttcattgctatacaattttacttgccccataactagacatacctgttttagttaaaatatgtacttactctactttgatttcaatttaaatgttgcttaacataaaacatagcaacccactagttactaagttttctttttaagcccagagaaaagcagaattcatttaaaattgacctccagcatggttaaataatatatttcatgttcatatttatttacttcaaacaaggtatattttcatggtttttgtacttttctacacttttgcttttagcacaataaacagaaaaaccatattaccacattctaatatgtttacaaattttttcatgaaattgtgaatcaaaacttattcaataactagagccctttaagaaacagtttgaagagattctgtgaagcttaagcaattaggctagaagttcttcaaagaatagaaatagttggacacacaacctcccaaacagcagaggcaggaaaaaaaaaattgtggggaaacctacaataatcgtcaagtgaaacaaactacatattttccttactactattgtttaaattttctgtcctcctcaactagaatgtcaattccaagaagagagggattcacgtggccatgtgtgcatccatgttcatatgcatggaggtgtgcatgtgcacgtatgtgtgcaaattgtgtatgcacgtgcatgtgggtatatgcatatgtgtgttttactgttgcatctccaggacctggcacatttagctcctcaatgaatattttggagctaaatgagtctttattgaatgaatggacaaatacaggcaagaaaagagggtgggcagaatatagaaaaactgaaactttctggctgaggaggaagaagcactgatacaccaaacctctcagccacgaaagggaggaaaccaaagagggagcacagcgcagatgtcccactaaactcggtgccattgatcaatctttctatcaccttttccaccacttgaatgattattttcagtccttgtatctgggatttcacttcctgagtattccagtctcttgagcttcccttacatcacaaactcaggaaattccttttgatttaatctcaagccagtcaccccatgcctggatgcaattagtccacccacattctccatgtaatatgcaaactgcgttattggtctccaaatatgctgatgattctaggcaacaatattgccttaggagttagggtgaagtattttgatttaccggatatgaggccagaatttttcattcacaataatactgagagctgcagccactttctaagcacctacttggccaccacactccgtaggacatttagtaaacatggtctatttattctccaccctgatcctggaaaatgatgttatcatcccacttttacatgggggtgagggagacaaagtcctgagacaaagtgatttgcatgagatcacagagctggagagtggcagtcaggacttgaggtccaaagctctctacctaacttttgacagctggggtttttcatacaagttaaagggcccagcctcagagaccatcacatgcttaatgatgcttctcatgactgacagatatcccagacttgcttgcagctaggcagactattagggattagtctaaacccctcatgttatagtgctcagcccaaagggtacacatatacaacttccatgcctaggttcccaccagtttcttagctctagttacaaagctcgatttgctacagcatagcaactgaggaataggcacctcaacaatgattaaaaacagcaaaacaaaacagcagcagtagctaatacctatgcactatttagtatatgccaggctcttcctaagaatgtttcacgtgcaattagctgactttcacagcaactctatcggatatgaattgtctaatcttttcatttaacagaggagaaaactgaggcaacaaagggttacataaactaatgatctaaggtcacacaagctgctaagtgattgagccaggatttaaaactggcagactggctacaagtccagcatttcaccactacgcaaagtgtcttttatgataattggccctctctgtactttttcttctacgtcacatgtaggtgaagattgcaaaatgattgcaaactctgcaatgggaaaaggaccatccaggaaaataacacaccctatgtatgcttcttcatttattacagagtcttcactttacaaatttggccaccaatacacagccctaataaatatgcatcaaatatactacggcttacaagaagtgtccatcaaagcagccatctctactgttatacaataggacagctctaatactataaaacaggacaattcttattactctataggtaagaatgcaggtaaaataatgttaacatgaacttgaggtgtggcctttataaagctgttaaatcctctcaggtatactcagctaggttgcccatctaagtttatagggttctggaaagcaattccttattcctcttaacatctctcccactttgcagcccatggtcccagaccagtcagtgctttgcaaggagtgagtctactataacttattctctgactgaccgcaggaactttcttccagttctgagacaacatcaacaatgggggtccctccacctttcctgcttctgtttggagtcaaatatgttagaatcattaatatcactgctgtaaaaaatgtcagaattatatggatctctgaggtttttgagtaccactaaaggagtatagtgtttgagtcaaaaaacctgagaccaaatatgagctctgcccttttagaacgtaactttcctttttcagagctgaaccaagtttcaacttactcatctgtgaaatgcctataatactctacctatctctaggaatgccttgaaggtcaaaaatcgtaacaataatgggggacaactgtggttcagtggaaagaatattagaataaagttagatgatctgagttcaagtttcacattatcctaacccacttcagtgaacaactgaggctgattccatctaaactgtctgaatctcatttttatcatctgaaaaaatattcacatttttaaagagttgctttaggaagaaaagagactaggacccacttcttctcaagccaagccagtgtcatttagactacaacaggttgtaagagtggcctgaggcaaaaaagagaacactctctccatgaaagaggcatcctctacctagctctggaggaccgtggccatgtagaaatgcaagcgtagggctgccaaatcttccattttcctacctaagcactgaatccacatttctatgtgaaatccttcagttgttagagttggcaattaattcaattttttaaaagcatttgatggctggccgggcgcggtggctcacgcctgtaatcccagcactttgggaggccgagacaggcggatcacgaggtcaggagatcgagaccatcttggctaacacggtgaaaccccgtttctactaaaaatacaaaaaattagctgggcgtgttggcgggcgcctgtagtcccagctactcgggaggctgaggcaggagaacggcgtgaacccaggaggcggagcttgcagtgagctgagatcgcgccactgcactccaacctgggggacacagcgagacaccatctcaaaaaaaaaacaaaaaaagcatttgatggccctagagaacatgcctacagacaggttacataagaatatctgcatcctttctaaggtaacaaggaacagttaccaccatcctaagcaacctaaggggatcttgaatatttttgataacttggtgaaaactagaggcctcctttcaaggaaaatgcatcagaacaaacagttagtgcatgtggggcttcatacctaggtgatatattgacaggtgcagcaaaaccaccacggcacacatttacctaggtaacaaacctgcgtgttccacacatgcatccaggaacttaaagtaaaattaaattaaatacaaaagacgaagaagataggtctaacatgattctagagcttcaagcccaggtaactacaagactgtagtttcattcgcatcaccagatgagagaaatcttgtttgggaagataagaaaggaacagggagatgacacagagctggaagagagaaagaaaaaaatgaataaactaaagtgtaatatgcttcagttgtgtaaggggtttgacagaggacaattttgccctataatttctagaacattacccaagggactaatgatagtgagtatctatggtggagaggggcagtgctggcagaggaggcacgcaggtggaagggagactgttttcactatattttgatacttgttttaaaccatgtgaattactgtctagtcatgacgaccaaaacaaattaactaataataaaaatctgatgctctccctcccttcacctcccaacccccgacaggcccagggatgtgtgacgttcccctccctgtgtccatgtgttctcattgctcagctcccacttgtgagtgagaacatgcagtgtttggtttgctcttactgtgttagtttgctgaagatgatggccacactgtcttccacaatggttgagctaatttatgcatattatacttttttttgtttttttatttgagacagagttttgctcttgttgcccaggctggagtgcagtgaggtgatcttagctccctgcaacctccacctccctggttcaagcgattctcctgcctcagccttccaagtagctgggattatagacgcccaccaccatgcctggctaactttttgtatttttagtaaagacagggtttcagcaggttggccaggctggtctcgaactaggtgatccacccgcctcagcctccaaaagtgctgggattacaggcctgagctaccatgcccagcctgcattttatatacagacttacttgttttcacttcatgtattatggagggatttccacgctattatatgaagatattcaataccatttttctgtggctgcacagtatcctatggtattggcaataaagcattatgtatttaattagacacacattgattacattgtttctaatcttttcttattaaaaccacagctgcaattaaaaaaaaatacacctttggttacattttactttcttcctgcttaaattgccttatctgaaaatgaagatactatcagtcccacctcacagagttttttaaagaatgaaatacatgaaaaatatgtaaaattcttagttccagaaaccaggtaaatcctcagcaagtgttagatgtgattgctattatgaaatgggtcatctcttatctacgcaagtatatctgtagaatgcattccaagcagtagaactgccaggagatttaaaaggaaacgggaaagtaggtattaatgtggaggtcccagaaaattgggggaaaccaacatgggaaatgaagcagccattggcttaccagggacagaggttgaaggtgtcccagaagccacatcgcaatagggacttgagaagtctgtgagtcctatctggtgaaagggtcccctgagctacactgggaatgtgagcacgcctcccagactaacattctcctctgttgttctaatcaaccagcaatgtgtctaggaaaggccaaattcttggcagccaaactacatttcccagattacttcagtcctggaagaaacaacaaaaactatgccaggtcacatgtctccattttcaggactggaaaatgagggcatagatttgtggctctaatccacagagggaaagttgagaaaaggacgtggagaaagggtgagtcaaagcaagtgaatgaccagacagtggccaacatttccagactccaaaagggcaagcaatatttgcatataccaacactgggtctgcagcagggggccccaacccttgggcagcagaccgaccctagtccgtggcctgttaggaaccgggctgcaaagcaggaagcgagtgacaggcaagcgaggattaccacctgagctctgcctcctgtcagatcactggtggcattagaatctcataggagagtgaaccctattgtgaactgtgcacgtgagggatctgggttgcacgctccttatgagagtctaactactgcctgatgatctcaggtggaacagtttcatcctgaaaccatccccacaccaccctcctggtccgtgaaaaaattgtcttccacgaaaccggttcctggtgccaaaaaggttgggaaccgctagtctatactcacctggaccaaatgcgtatttagtgcaaaacaaggaggtcttcaactgctgagggaattgggttctaagaagtggctaagagctaacaggtaggctaaagagctaataaaaccaaatccctgagctcagataaaaagtaagaataacctttgtccatcagtgtcttcatttgcctattgcaagatggatgttaggacttagagttggcaggatataagtatattttcacactttgggaggcagaggcgggcggatcacgaggtcaggagctcgagaccatcctggctaacacagtgaaaccccatctctactaaaaatacaaaaaattagccgggcgtggtggcgggcacctgtagtcccagctactcgggaggctgaggcaggagaatggagtgatcccgggagacggagcttgcagtgagctgagattgcgccactgcactccagcctgagcgacagagggagactccgtctcaaaaaaaaaaaaaaaaaaaagtatattttcaaattttttggcctactttcaccccccacctctatttcacctctacccaaatctcatcaaaacaagcaaaaaagagcactttgaccactcactgggaagaattccaactgcaacagtttacaaagaaaaccaacataaatttcacttgaatgtgttacgctgacctcccaaaatccatctcagctaattaaaagaagctgcagagcagttcctatggatattagcattcaggtcctttaggagcatgtttacgtggcacatcaccttgctgggaggctcccagtaccctgggctgaaggcatcaattctcactggcaacggcacggccgcaagagtgtgatcgcaggctctgtggaacctcatgaaatgtttaaggactctcttggctcacatctcactcttcctcactctaccccatctcaggcttcaccttctccccttgctagaagccacttccgtggcagacgctctgggtgccaaggtttacagtaacaccccaatgggacagcaagattaatgaaagctttctgtgggtaattcaactctgttcagtaatatgacactgagaggacaacaggagcttgcaggaaagaagaggggtaaggaaatgggagagccatcaagatgtgcacatgaaaacctgtttgcaatgtgggaaggactcatctggtcagctatggctatttgtcagcatagcatagcagccacttcaccatgagaaagtgttatatgcaaacgacacctcctcaaagaggccctcacagactaccacagccaaatcctctcatatctcttttccctgcctgacattaaaagtgtactccctctgctgctttgtctgttaccgacttcccggtccagaatggaagctacaaagaggcaggactcgtgtctgtctcataatactccattccccagccacttaaagtgagcctggaacgtagtaggcacccactaaccttatgaacaccagtgaatgactagctggaattctgcaatagcttttaattttaaaatgtgcctacaaaatccatcaaaatccattttccattaccatattagggtatgaagaggggaaaaagtatcgagtaaatactggatctgagtcaccatgcctggcattttatacataatagtcacttaatttctaggactctctgaggtcggcatgactaatgctatttcagattaggaaaactgaggttcacagatacaaacacaactcacccaaagtcgcatatgtggaaagtgatcatttctggtttgtctgatccaaaattccctgcatctgtcactccccaccctgatcgctctctggctcctaaggctttcatttggttttcccaagatcgggctcccctgtgacatgtctccatgacaagccgttagtattcactcagagacaaattccaaacgcatctttgatctcactacttcaaggaatccctttagtcacttagaaatggaaacagtctgtttttataaatggctcaggaagggaggacagtcatcgcaggcagagtcctacagagagcgcgagagaacatgggaagcagccgaccactggtgcaaggaaggggctcccagcagcagcagcaggaggagccccagggaccaacttgggagaggtttgttctcagatccagtgctccctttcttcacacagcaagaactaccaccacggacgtgtctcctttctttaaagtgctttgttatcatttactaataaaggaaaactcacagacccaggccttcaaaagctctcgccaaaagtagggaaccctcaatgaagcgcaggccagatgccagttttcggtgcaaagcgatcctgtgatcatcaagaatttagaagccttgctgaaagtttccactgcacacagaagaccacacaggacagagtttcttccacggggctaaggcctaattcccgaagaagccactgcggcttcctagtttggcacaggtgtcaaaagccacttttggattgaccctttttgtccgggaaggtgaagcttcctaaggctagatggaacaagctgctggtgcagtgtctgcctccccaagccaaagagcagatttccacaaggccacccgacaaggcagtctctaggacagagaccaggcccagataaaaggctttagccttggcagcacagtgcactaagaacaggcctccagggtggagacacctggctgaaattccagctctgcgtctcactgctgtttgacctggggctgtgcacatcacatctctatcagtttccacatctttaaaatggggctgataaaaataactacctctcagggcagcctgcaacaatgatgcatgtaaattgcctggcacataatggacattcaatctaacattaaccaaaacattattatttttctcacaaaaaagaccccaggaggttctgttgttccattttctaactcacccttattgctctgactgtaatcatacccaaaataaaagccttttcctaaatttgttgtagcagaatggtggcctgattctttctatcgttagtaaggcaactaactggctctcactccttcgtctctaaaattaagcaaatgaaaacatgcataatgtgggtgaagaaaaggtgaactacttctatgtgttcactgatgttttttttttctttgagacagaatctctctctgttgcccaggctggagtacagtggcacaatcacagctcactgcacctcaacatcccaggctcaggcgatcctcccacctcatcctctctagtagctgggattacaagcatgggccaccacacctggctactttgttgttgttgttgttgctgttgttgagacagagtctcactctgtcaccaggctggagtgcagtggcgcaatcttagctcactgcaatcttcattttctaggtttgagcaattctcctgcctcagcctcccaagtagctgagattacaggagcccgtcactgcgcccaactaatttttgtatttttagtagagacggggttttaccatgttggccaggctggtctcaaactcctgacctcagatgatccacccgcctcggcctcccaaagtgctaggattacaggcatgagccactgggccccttagtacaggggctagagtaggtaagccattcactctcttccccaagaggacagcagagacccaagaatgagacagaacagaatgtggcacatagaaaggatggatggacttggagtcagaagtcagaaagtacgatcatacaatctgaaaacccactacccacatacagggttgcttgattttagcaaatgaaaatacaggatacctggttaaccttgtatgtcagataaacaacgaattttctagtatactatggtccactatttttaaatgtaagtatgttcaaatatttcatgggatatacttatactagtcattatttatatgacaatcaaatttaactgggcctcctacattttacctggcaactcttgtcatgtaaagatcttaaatctaccttgatgcagtaaaaagaatatggattttggagttaagttgaactgcgattgaatcctggctcactacaagctcaatgtgtaatcctagctagttatctgaactgcctgaatcttgctttacatatctgtaaatggcagtgataacacctcacagggctgtgctataggttaaataaagataatgatgatggcgataataattactaatattgacagtttcatttattaagtgctcaacaaatgttagccttctttgctctttgagcctcaaagatttcccatctacaaaatggggttaaagatattggtaataaaattcaaatatgttttctgataagaataaggatacttcagccttcctcccatggatttctgggaaaaaatctcaagaatttattttctttgggtctgcaaaatatcccctttatcccacccaaaaaggtcatttttggtctgcctggttgtgataaatgtattttatgcaaaatagtcttgaattttctctcaggagttcacatactctccttctcatgtccgtgcatcccttcaaccagttatttctttaaaatgtggtctgagaatgtcagcattagaaccacctgtaatgccaaaggacttccctgagcccagttacagaacaaccaaattagaatttctggagctggacccagaaagcatccttcttcttttttctttttaatttattttaaatttaaatagagatggagtcttgctatgttgcccaggctggtcttaaatgcctgggctcaagtgatcccctcgcctcagccccgaaagtgctgggattataggtaggagccaccatgcccagccaagcatccttcctaacaaactcctcgtgtggttcttaaacccgttcaagtttgggtaccattaccctaaaacctcaaccccaggcccaagagttacacaagcagactcaccttccccaaagttaacattaatattctgcaagggatgggaacggtgaattccagagtgatacaagaatggaattttcaaagcttttatatgaggaacagatcagctcatctaacactctgttttggagcatttgtgtcaaattgacattccaatttaaagaccatacataaaaccccattcaattatttagcactgtacagattttacataactcttgaagttactgactcaattcattttccttcgaactgcaagacagattaatctaaaatgaattaagacaggcaaccagaagtaatgttgccactgccagtaaacagtctttaaactgctggatcagtaagctgcttacagccttgcaagcgctgacgccacatctgctcggcaattcatgtgctctcaagccaaggatttagaatccatgtttgtcatgatcacagaaactcgagagagggggtaatgtttaacccaagccttttcttttaccaataggtatcacttcttccccgcaaaatgaacatgaagaccatgactcggttacaaatatttcaggttacatcaaaatgcataaatgtatccaaaattccacgatctaaagtttctaataatttggaaaaaaaattctaaaataccctaaattattcctgacatcaaattgctcagagtccggcagagaagaaaaacaaaaaaacaattatgagagatgctagaaagcatgacaagagagttccagtgtcaagagggacatcaaagccagatgttgggggaaggaacacggcagaagagttcctagaaaagacggcatctaaactaagaagggggtaatgcagatgttatgggtgaactgtgtctcccaaaaagatatgccaaattcctaaaccccagcacctcagcatatgactttatttgaaaaagcagttgttgcagctgtcaccccagcctggagtggggagggcccttaatccagttgactgctgtccttataaaaaaaggaaagagacacaaagaagagaatgccatgtgaagacagagagagatgcacagacacagagggaagatggccaagtgaaggtggcagcagggactggagttaggctgtgccacaaaccaaggaatgcctggggctaccagaagctaccagaggcaaggaaggaaacctataggcttccaagggagcaggactctgctaacaccttgattctggacttctagacttcgcatctgtgagagaatagatttttgttgtttaaagccactccaggcggggcgtggtggctcacgcctataatcccagcactttgggaagccgaggtgggcagatcactagaggccaggagtttgagaccagcctggccaacatggagaaacaccatctctaccaaaaataaaaaaaattagccaggcatggtggtgcacacctgtaatcccagctacttgggtgggagaggcatgagaatctcttgaacctgggaggcagaggttgcagtgagccaagatcacgccaccgtactccagcctgggtgactgagagagactctgtctcaaaaataaataaatgaataaataaagccactccgtttgtggtactttgttacagcagccttgggaaatgaatgcagtaggacggggccagagggcatgggatcctgacgtaggaaagccacaggaccaagacctggaggtaaaggggaaggccacctttgtttcaaggaaccacaaagaatttagtctggtgggaagagaggaaggcaggcagcacctggaagactttgtcccggctgcagtaaaggccatcttctgctctgcattatgctcaccaaaaggcttaactctaaggagctaaccccagtctctagcagaatgaacaagaagcatgaaactgctcccagtaaaaactaacctacaactgaaaaggcactgtgaatggaaacgtgttcccaaaatcatcaatactcactgccggcagacaacaagccaagctttccatgccatcacaaaattctgagtcagtgactggaacagacacaagcagcctctggagttctggtgacattcgatttcttgatcttggtgctggttatagacgtgttcactttgtgaaaaattatcgagttgaatctttgtgatgcacgaacttctctgtatgcatggtacgtgtataaaatttccaatgaacttccaatgaaagaaggaaggaatatgtaacatttagcatcttgttctcccagacggaccggtataatcatttataaagataagatgtccatcatcttgaacggaaaatactgctatccgttagtctgcttgaatctgaatctgatcaccataggataagtttttaaatctccaagacattactaagtaaaacctacctcattctccttatacattatcctctctttttaggctaattaaaaagcttgtctcagctggcctgggttaataatagaacactatttcttatttaaacaacaaatctcacttttaagaggttttgtctcttgcaaaacctcaggttttatatgaaacaaaagagttatttgacgcatgtttttacctgagttgctaaagtaaacagtaacaaagtcagcactgagtcctcaagaaagctaagtctgattcagggacttatctcccctcaccactgtatctcccctccaccactgtatctcccctcaccacactggtatgcagacactcttgccattggtttagaaagcagatgataaatatttaaaatgggtccacagtccaatgaacaaaacagatatcaggtagaaaatctcctaattggcagattacatttttagttataaccccaaaatggcttttgcaaattatcaaagcaactcaaatctgcataatcttaatttaaagcaacataattcgagactgtgaggaatctaattgccagctaaacaactgtttccaaccgtaattggcttcccacaaccctgcacacgatcatgtacacacatgcttaaaccacctgatgtggaaggcatctggaccgagcccagcactgccaaaagaatctttgaaaaaatgcaacaaaaggaatgagctcttgcacagaattttccacacattggctcagagcaatttcgctttccagaatgattcccttaactgtcaagaaggggattatagtgctattcattgcacaagcaattttttcttacaattaattttcacccttctccaatgtatagaacagtgtgatatatacatatccactaaagacagatctataggtgtatgttactagttgagctgtgtcctctgcaaaattcataagttgaagacccagcctccaagtacctccaaatatgtccttatttggaaatagggtcattgcagatgtaattagttaagttagaatgaggtcataccagagtagggtgggtgcctaagccaatatgaatggtgtccttataggaaggggaaaaattggaaaaacacacacacatgtatgcacatacacacgggaaaaaacaggtgaagatgaaagcagggatcaggatgatgtttctataaagccagaaacaccaaagattgccagaaaatccccagaagctaggcaagagatatggaacagactccctctaacagcccacggaaggaaaacagccctggcaacaccttgatcttgacttctggcctccagaactgtgaggtttgggttatttaatccaccaagtttatagactttgttacagcagacctaggaaactaatacagtgtataacaacaatctttaagtaaaaatctgtgtgtgccactctgtcttacttgtatacgcacatacattgagagttatcttccaggaaataataaatttcgttattactaagcccttggatgtttgatttacaacagttgtgggtgcatgaggttaatcacaggactggggaaattctgactcacaatcccaaaaggctgaagttccaaattttgtcacgcaaccctgaattcactccagctctgggaaacctcaaatcccaaagaaaacacaacctggttttctctctcttttttccaatacagacataggtataatttaataatagtaccctgcttcccaaatgcaattaaaaatggccttcattactcctctgaatgagtgtgttttataatgctgcaatctacggttcaataaaaaagcaactactgcacctatcatggcaaagctgtaaaaactgatcagtgtgcttttggtagctctagaggcagaggaaaaaaagaaaaaaaaaaacttaaaggaacaggcacaaaataagttggtacaatgtgagtgctttagaaatccagtttttcatttctgaaacctttgatttccctaactttgattcttttcccctttcacttaggaagcagtaagacatagcagtacgattgaaagaaagaaagaaagaaagaaagaaagaaagaaagaggaaatgggagtaattgagattcaaacttttatacagagagaggtaagtcttgagcacatgtatctctaaatcgtcttctgtgctgttgtactcaaaaagtgtgtgtttgtggacagagagaaagacaggcagagagagagaatacgactcagagccatgcttcttaaaacaggaagaatcattaaaattagcaactcagcactaaacagtgagcagaaccacaaggtaaatggtgggtccagattctatcgcagaaaagagtcatttcctgtgactattcatcgtacatcgtcttggaccagaaaaggaaccttgaagtcatctctaagatcttagtgtctttcttttcccaccatacccaacaatgctcacagggtgacctgaacagaatgaagttttctgtgtgtcacacacaattttaagcactcgctatgtattaagtattgtcaacatcccctttttattgttggaggaactgagacaaaacttaaataactctgaccaaagttacccacttggtaagtggtggtggcagattccagactctgccctcttagccaccaggaacactgcctttcaataaatggtgcttggtgaaataaccaagcaataaacccattgcatgaggaatgcttctttcatagtctcatgtttcagagccctgagcagttcaatgtgcaaaagatgcccagcaatgttgctcacccctggttattttggggttgctcaaagtctctgctcttcttccatctttactgatttattattttactggtcttccaataacttcagaagcaacttgcatgtttttataaaataagagaacctaaaatttgtgtttggggttttattagtcattcttataaaaatgcttgtctggaaaggattttaataaaacttcatttggaaattactagaggatgcaatcgacccatctggcctcagttcctacagacacataaaatgtaaacagttcactctaacactactaaagagtctatttacaagttttcagccttgctagaattagaaggaactactaattctagtagtctagggaaaagactctggtctttacataccttcactttcagtggttgcactacattacgatcttgtcctattatgtaaaatcataactattttaattgtgttatttaaaacacgttatagatgctatgataatcctctataaatcaatgtttagtgcattatctgatcaaagacacaaatattgagctttttcaaatattcagctaaccaacatttgacaaaggggctggtgcagctaattcttgctgtcatagtcttctttgattaaaacacagaatatgcccttcagcattaagcactctgaggttatttcaggactgtgcctgatcgaatagtattacattatgggttagcacggatgaaggagaggagatctcagagtcacagagtatgtgtgttcttcagccctcactctgctgtatcagtgaccttccagcaagtcacttagccttctttgaccatagcaaccttggctataaaaccaagacagtaatacccaccctccttctaactttaatgggtagttacacagatcaaataaaacaaaacacataaaaagtacttcgcaaattcttcggcatcacgtggggaagatagagttaaaccaaatctacattctttaatgtagcttagcttttcaatgataaactgctttacattttacagcttccagtgtattttgtatgtaagaacaatatttatgagttcatttcaaagctttctaatttcagttagagtcagtgggaagcttacacattaaaatttctcaataaatcatttattgtgcaaatatgaactcttatttaaaaaatttttaaaagagggaggctttaattggtaaggactgcctaactgtgcactttgagttgcttctatgaatacgcttttcatatggcagacagttgatcatgtattacaaaggtttttgttctgaccactaatatgtcagatctgcaggtatctctccccaaagtcttatgaaactacttccaacatgaaaattctctctgggttaactcattgggtagctaggttacaagatatatgtttttaatctctcttttgggctaaacatttggctaataattgtcagggaggttttgacattagaaatttatgactcaaataaaactcttctgcagaagttcaggtactgagatataagcactgtaaaatgaacacttctggaagacggccgattttaaaaacataaaaattgtcaccctgggtcagagtagaagtccagttcccaccagactttatgtctgacagtggcatcaaaacatattctgtacaacagaatcgtttccctgtgtgatggttcactcaagggttagggatattgtctgaatgtttgaaacttacccttgagaagctatcattgggttttgcctaaatttttcttgaacacacatccctgacaccccagactacacaggttcttcgggaaaatgagttctatttgcttgttatcctctgggcaaagacattccatttccctttatttaaagtgaaattatctccttctagcataaagaagtgcccttttgttacagtattctgggattttgtgagcaagtccgaattccacctgactatatcctacatgactcccttcatcctccaactttcaaatcctaatctttttgctctttatccaaatctgcactatcctattaatcatttctgttgccctgatcaacctattttggtcaatgcgtagagagagagctgggtcatacataagcattttccttcatttcagtaagccttccaactcacaaaattccaggtaaaccaaccatcagtgaaacctcagttgcagcctttacatcaggtacaaattatattacctatgagcaataacctatttggtatctgtgaagtttatatatatgcatatataactgggaaagcaagaaaaaaattaatgcagggggaggcaatatattaaaaaaagatatacttggccgggcgcatatatattctttttttttttttttttttttttttttttgagatggagtcttgctctgtcacccaggctggagtgcagtggcacgatctcggctcactgcaacctccacctcccaggttcaagcgattctcctgcctcagccccctgagtagctgggattataggcgcatgccaccacgcccagctaatttttgtatttttagtagaaacagggtttcaccatgttggtcaggctggtctcgaactcctgacctcaggtgatccacctgcctcggactcccaaagtgctgggattacaggcatgagccaccacgcctggcccaaaaaaaaaaaagatatattattaattcctcttaggatcagctttggactcccaaggttaacccaacaatgtctataactgttgctcattattttaataattttaaagatttattatttttctggaatgcaacgagacaggttaaaagaaacaaccaattacttctcatgacaaaaagaaagtatgttctatcatttatggaggtaatgcctggggaaggcagtaaaaataaaatatttgaaccctggaacattcacagtataaggcttagcacccacgtatattttaatatgtgataactttatcaaaagtcaaaagtcaaattaatgaagggtaggaaaataggaacaggtggttagaggattcatatctgtagcttctgtctggtgtcataaaccaagtcataaaccatactaaatttcaaggcaaggtcccaatatttcctggaaaataaccaattgtaagtattcaaaatgtttcataaatgggcaaaatagtttcatcacttaggatgaaatagaataaagtttacttttgtattatcaggaaaaaggaagtttgctgggaataaggtaaacaaggagaaattattcacttaagacagattaagctattttcaatcacttcaaatacaataacattactaggatataaacaatgggttaattataaataactcaggaattgttattaagaaagaccattcctgactattggcaattagcatggtgttagcacatctaaaacaatgggtaatagcaaatacttcttcctggctttggctaagaagaaagctgtcagcagaaggggagctttaaaataggaatggcttcactctctgagccattttaagtgcaagaagtggaccaatagaaatataaactgacagccttcctagcaggctctcaggctactaggaaaatgtagtcatcataaactaaaccctcagccttcaaaaataaatgaggaccacgtccagatgcagagctgtacgtagaaattaatctttctgtccttgctccaaactctatgttttctttttttagacacaaagattaacactaaagaggtagatgaagaaactaaaaagggaaaaagcaatagtaaatttgaaagaaatagcagctgcaacagcaggtaatacatatccccagcagcttattagaagcaagacttgagcacagatacagagccgctcattaacgataatgccagttccagaattagcaatgccatttcttcctttcttcctgcatatttgttcaccctcacattgtggctccacactgcatgtgaagttcctaccttgtgccacatgctgggaatacaaagatgtgggaccctaatcttgccttcagaggactgtaagtctagagtggacattgctcactttctccttccccctatctcccatccaccacttattatctcctggatgccccattaagccatgaaaatgtgggagaaatcttagaagaaaaacagggactacttatgtttcaaaaaataaaccacggtagaaacaaaagagatcaaggaaggtgagaaaatgtaaaccctgtaagctaatacccttaataactgccaagattttccttgacggtgcctatgatcagcctttctagaataactgacttcttagaaaatggttagaaacaacaaaaagaaaatacctaaggtctacagagaaaacatgtgtttggatactaaaacacaactgttttccaaaaggtagcatttcctccctacccaaaggaagtttctacatcatacattcattcatccagccagccagccatttgtttttcattcattcaactatgatctacggagatcctattatattccaggtaatgcacagactctagggataaaacagctttaaaaaaaagaaaaaaaaaaacagcttcatttctgtcttcttggaacttgcagttcagtagaggcagaaagatgctatttaaataatcacacaaatatggaacttacaaactgtgctaaatgccctaaatgaacagtcaagaaactacagaatgtaacagagtgacagctaatataagaaacaagggaaggcttgtttgaggaattaacagaagaacaggaagtgggcctagaggtctgagaaagaggagaaaagtgctggatgaggctggagagttggagggaaatcagatcacaggaggcatgatccttgtagagcatgataaaatggtcatctttcatccaactagcagcagtgagatattaaatattgatgtgttttaaacactagagtgaaagttcagaattatgatttcaaactatatcttgatattcgcatgtctgtgtttatatgtgtgtttctatgtacgtgtatgtatgaatccttatctatgcatgaagtatatctagaaagagacaaaaggcactgcagatagtggttgcttctgaggaaagaaactgagaaaggacaagctaggagaagcaggaattccctgtcactgtactgggggtcagagtgggaagggacaggagtcatttgctataagaagttttctctgacctagaaagagacacaggactaaggtaggtaaagaaacaaaaacaaaactctacagatgaaggaaccagatccactcctggctcaccgctgtgggcttcaccatgaggaggagaactccaaagtacaggagcagacttctaagttttgacctcagccaaagacctggagagccaacattccagccaaagaatgttggctcatggaataaaaacaaaaacaaaacaaaccgcactaggtcaagataacaaaatgagagaagagcttgctattattatctattcatgccccaccggatataccttgaaagacagctgaagggaaagcttagaaactttctccaaagggctactttcgaaagcttttatcatctggactaaaaaaggcccaaacaagcaaaagaaaagccccagtaaatgcaggcacaagactgtaaaaggagagtgaggagactgacttgccaggccagcaagtagctgagaggctaaatgatggggctgtgaacctccggcaaagcggttttaggcacaggagaaaaaaatgtgatgaaggagtcttgtttcctttttttctcttccataattttttttttcaaaaataccacttcaatcaaagttttgacaattatgaaacatgtcagctgatagtgagaattcatcaaatgtgccataaatgacaagaaatgagaacccgaatcctgaaattggatgggcttcaaaagtttctgacaatcactgccataaatcatccaggcatatcaatctctggctggaggagggtttgcaagaggtaaaaatgcagacaaaggctcacgcagaaaaggactgccacactctggatgggaaaagagtgtactctattgtgagggctgtttcttcagttacagaggttggcgaccagttacccagcggtcaccataatgaaaacacacagatgtttccacctgtacagcaagagacacaagacgcaatggcaagacctacaatcttcttaggaaccacacggcacctactgagccagtcatctagctcacaaataatgacatcactcctctgtccacaatgtaagggctggctaaggtgagggctaatggggaaaacagcacacatttatttcattagattcccaagatgaaaggctcaggttattattttttatttatgcaaagtttgtggcatgctgttgcttgataaaaaggtaacaatctctgggctctttttcctttcaatttctctacttcttttatcttttaatgcaattaaacataatgaacctgcctcttggttataggtcaatataaactgtgaaattcctaaaagggcaacacaaacttttgagatttcgccctgagatagcaatcaatatattcatcatcaacatctggggtatgacctacgctaagcctctggagaaaaaaaaaatctcttgaagagtagtactaagttgattttcatttggttcccagttctgtcacaaatgctgctatagtcaaatcaagccacttgatggttttttggttcttttatctttggggggagggaacagcattagctactacaaacaaccatcagtcactgattcaccggactgcctgggccatgtccagctccttcaacaatccattagccacacattctggacagtgccttttccaagcaaagatggtccataagatggtccatttggaaacacaaaacagagtcttctcaggcatcagattgtccaaggtaatgaccccatgcacagctataggaatctgagttaccaaaaatggtacttccagctgggctcagtggcatgtgcctgtagtctcagttactttggagcctgaggcaggaggattgcctgagcctaggagtttgagcccagcctgggcaacacagtgagaccccatccccaaaaagaaaggtagttctagccccagaaaatgggtcataaactgactttctgtgataatttactttttagagaaattgcaagcactactcagggttagtgttttgaaagaaactcaagtacacagaatagttttacaatgatatatctatttgtatcatcagaaaattaagaaaggacaaacagacttccaggttcctgtttatagaggggttttcgagtttccaaatcagtttctttcacacacacacacacacacacacacacacacacacacacacaatcgcatttaatgctatcaacagctttacaagaataactacattctacaagggtggaagaaactgaggctcaatgaatttaacagatctggctcaagggcattcccctaaatggcagagccagactctagctcaagtctttggactatcttcacacctccctctctctacaagtgcttgctctcagtatcagcttacataaaatgtgggtccaaagagcaagcagattactttttgaccacacaagcttgtgctaagctgcaactttcttgcacaccctcttagcaattgtctagagaaaccatctgccccagcatcagtcacttcccatgcccccatatcgacacattatcaatctccaattactcttacgtagtccagaaaaaaatcttccagtgcattatgagcactagaattcccaccaacgtaaatgacgctaaacaactggcaaaatggcaaaggctaaatttgcagccgctccccagttcccttcctggttgccttgggaattattaccttttattagtgcaatctcagagtttacagttatcaacaatatgcaattatcaacacatattagtcatgctgcttgatgcttgaccttactttcccattaatagaagtactgcagttactaaatgaattacagtgggaattaatggttgccaaaatgagttttcacctacaagtaaaagttttacaactaattatgcagctgtaatgggagaataggaggcagagttgtggtcccagcccctaaaggcccttgtgttgaggataacaactaaagcaatgaaaacctacaacacgggacagatggcgaaagtgcccatgcctggacgtctgcggcagccgctctcttcccagagctcccaacactccactggtggccaagggccatgttggggaaagggcaaggacgcatctggcctctaggaaaaataaattctttccaaaacatatttccaggttaattggaaaaacaccagatacctctagaaaattgatgcataaaagaattcttgatagaaattccaacatgttccattcaccagatgctgtgttttttatagaatataagaatcttcctgttttatttaggtgggtgtctgatagcctggtagtttctaatttttccaaatgaaataagatatacatatatagatatacatatgacactagtgtatataaattatatacatatgactaacatatatattatatttatatatgagtagttgacaaatgagtcaattataaaaaggaaaaaataaaataaaaaaaaagtaagccagccgggcgtggtggctcatgcctgtaatcccagcactttgggaggctgaggcggaaggagcacctgatgtcaggagttagagaccagcctgaccaacaaccccgtctctactaaaaatacaaaattagccgggtgtggtggtgcatgcctataatcccagctactcggaaggctgaggtaggagaatcgcttgaacctgggaggcagaagctgcactgagccaagatcgcgccattgcactccagcctgagcaacaagagcgaaattccatctcaaagaaaaaaaataaataaattagccataaagcaatgaataatactgtaagatatattcaccataaatatatatcaatatacattaaaatcaaaatatatgattgtctagttaggcagtatgttctaggcaatatacaaaggactacatgtacctagattaggagtttaaaataagacagttgtacagagatacatttgtagattcaacattgatgaatataaaaaataatgtgccaggctcatgcttgtaatcccagcactttgggaggccgtggcgggaggatcgcttgaagccaggagttcaagaccagcatgtgcaacatagtaagacccagtctctacaaaaaataaaaatagccagacatagcggtgtgcacctgtagtcctagctaattgggaggctgaggtgggagaatcacttgagcccaggagttcaaggctgcaatgaggcaccatgctaccgcactccagcctgggtgacagtgagacctcatctctttattaaataaattaataaataaaaagttacaagtaatcctcttttaagggccatggcatgcacagataataagttatctgaaatgtgaggtcaggtagatctgagactaaattatagccccctttgagctatgagaccaccacaaagtaactaacttctccaagagtcaatttccccatctcacaggtcagggtcttatagtgctaaagttctgtgttgtactatgtggcacaaagtaaacacttaacaaatcttagtgactattcatctgcagatgaacttgatctgaatgtgataggccaataatgtcaaagtcttgccacccatccactttgctcgttttacttactactgacaaatgccactttgtactagcttcagctgcaaactacagctctcagagtgagggcatcctacttgcacattccttattgattttgagcacaaatattttcccacaagtatttgctttcctcaaggttaaattacaagttcaaccaaactcttgcaacacattatttgaacttcactaaacagttttatgccccatacaatgtgggtggcctaaattctgcacactgccaaaacttgagaatgatatttatccagaaaattcccagggatatctctcatgaaggttgcaaaagtatttagctctcactctgataatgattagatttaaaaccgtgcttttctctctgaggctctacaaacatctccctctttccaccaccctcaaataaaataaccacagagtggttgagagaggtgattttgtgagaagggattacttctaaactatgttttcccatacttagaaaaaaaaaaaaaggctaaggatataaaagccagcctgggcagggctgacacaagaggctgagagaagagcaatgggaaaagaaacactgaagtgacaaataaataacagtattctgaaaagaaaagtgcgtacaccatataaatagtaattaaacctcctaggagcatgtatgcttttatcaggaataaactcatctagataccaggtctacagtttagaaagagaaattagagggttttttttgtttgtttgttttttaaatggagtttcactctgttgcccaggctggagtccagtggcacaatctcagctcactgcaaccaccacctcctgggttcaagtgattctcctggcttagcctcccgaatagctgggattacagggatgtgccaccacgcccagctaatttttttgtacttagtagagatggggtttcaccatgttggtcaggctggtctcgaactactgacctcaaatgatctacccgcctcagcctcccaaagtgctgggattacaggcatgaaccaccgtgcctggccagttagaggcttcttgaggtcttggcttctgtttctagaaaatgtaattcctctttcctgcttttccccttccaaaggaaagaggaggaggagtgaaaacactgaagaagaaacaaaaagggatacttggttcactttcactcttacgtttctaaaggtccttttaaggtgatcaaattcttcccttcccccttctgaaacatgcatctaagaaggagcatacaaattcttgaaggcatgagtatcaatgatgaagcaggtcccatgtgtaccctagttgagagcctgggagtggatggtctagaaacagcctgtccagtctaaacaaagtacagatggggtgtggggggaacagctgctcctcggctccagctaagtgccattgagtaagaatctgggccggagttgctgcaatttctgattttccattcaataaaatatacaaatcctaatattttggccggcaaggtgactcacacctgtaatctcagcactttaggaggccgaggtgggcggatcaccagaggtcaggagtttgtttgagaccagcctggccaacacagcgaaaccccgtctctactacaactacaaaaattagccaggcgtggtggcccgcacctgtaatcccagccactagggaggctgaagcaggggaattgcttgaacctgcaaggcggaggttgcagtgagctgagatcgagtcattgtactctagctggggtgacagagtgaggttccatctcaaaaaaaaaaaaattcaaatatttttttcaagggaaaaatcttacttaaagtcagtgactaatttaaagttaaaaggcttttgagccaataaaaccctctgtgagcagccaggctttgacttttgaactatagtgtctccttccccttgaagacacacatctctgtcctatccccgagaagtaaacaagggcttatttttcatctccctccatacctgccccttaaagagatagtaagggtccattcaacctgagattaaatttcaacctgacctttaacgcctccttatgactcagtggtgtactgaagataactgttaaattttcaggaattttacaagccaatgtcagattgacagcttttaattggctacgatgagactgtttatatcacagaaactggcaacactgcaaatcaaggctgctcctcaaccctaaagccaattgtcaagcatttaccagcaaaccactgattatataatgtgctatctgaagtgccacacccttgcagtgactggctgagcaattgggttgagaataaaataaaaatgccaagtcgttaaggttggtgcaaaagtcatcgcggttttggccattactcaatggccaaaaccgcgatgacttttgcaccgacctaataaatgcaatacttgtattaaattaacttgggtttcttttaatgcagtgaccctcaatctgtagtccccggagcagaaacagcaggagcaactcccgggaacttgttagaaatgcaaattatcaggtcccctcctagacgtggtgaatcagaaattttagagtgaggtccagcaatctgtgctccacagagtcccccaggggattccgaggcatttgagaaccactgttttagaacaataaagatttttttcagggtctgtgctaattttcatgactctctaatataatctagtgtctttaaaataccatcaaagcttcacagtgtctttcacagagggtaacaactttttttttttttttttttgagacagagtttcgctctcgttgcccaggctggagtgcaatggcaggatctcggctgactgcatcctccgcctcccaggttcaggcaattcatctgcctcagcctcctgagtagctgggattacagacatgtgccaccacgcccagctaattttgtatttttagtagggacgaggtttctccacgttggtcaggctggtctcgaactcccgacctcaggtgatctgcccgcctcagcctcccaaaatgctgggattacagacgtgagccactgcgcctggccaacaatttaagttttaagctaaactgaaatttttatccccaggtatataattttatagataaccaagaatcaggaataaaattttctcccaggtgaaaattctaggtacattcttttcacttcaacctcttatgaaatgtaccacttaaaaaaatgcagcacaatttcagtttacagtgtatgacaacaaagactaggaaaggggttgctgcctatctggctgtcaagggctcttccacgggtcaagtaacttcaggtatttatgcccattgcaatgcgctaaatatgtgcccactccctgttctcttatactaggccagtctacatatttgtaaagcctgtatggctgttgtcacatttgatgttgagacccctgctttcagaaggactgtcctaatccttttgttgtttgtgagttaagtactgtatttctttcctgttgtccaacatgcagaagtcttttgtaacataaatgttaaaacggtgttggtaataataccacacaatctgtaccaaggctcaggtctctgtgtccagaacattactaaaatgtacatactgtgttcagatttaagccagactcttaacttacttaagatttaagtcagacttaagtcagacttctaggactctaagtaactattcctaaagattcagtttcttattcattcatgcattcattcattcgagacagggtcttactctgttgcccaagctggagtgcagtggcatgatcatagttcactgtagccttgacctcctgggctcaagcaatccacccaacccagcctctcaattagctggaactacaggtgtgcaccaccacacctggctaattttttggtttttgtagagacgaggggtctcactgtgttgccctgattggtctccaactcctgggctcaagcaatccttctgcttcggcctctgaaagtgctgggattacaggtgtgagccatcacacccagcaacagtttctcatttattgaatgaaaagtttggatatgattatcttctaagtcaactccagtttctatcattctacatatcatggatgtattagcaaaatctgtttgcaaagtacaggtagtggctgcattaaccatcactatataattttaataacaaactgttagaaaagagatggcgagaagctaaggattaatttggaatagaaggcaaactaagaataaaaataatacaaataataaggcagaagcagaggaaaatttaatccaggtaagacttattaaacatccattataagcaagactcagattattcagatggtagcatattgtatccacaatgtattgggttcctcttctaaacagtacatttttaaagagatgattcttcatttttaaagaggtgattctctgttaactcttgatacagttgctggaagtgacctactttaattttaaatccctttggaatcttgctgtgggtgattctgaggcaatcccagaagggtaccatcattttttaaaggaagctttgtatcaggtacatgtttccttggttaccaaaatcacaagcacatgtgttatttcaaacacttccttccagccaccttaagacaacgtttctgcaacctgtacagaatctaatgtcttctcgaagagaaaactgttaaaggctgacaacatctctcagagctctggaatgtgagctgcttgtttgaagcagcttttaggcacagagagcccagcagccctgacaatgatggaaaagcacaatgccaccgagatcacacagatattaatgtgacagtgccttggcctcacttgcacatctgaagtcacagagcttctgatgacctacagcatcttggagtggagtagcacacgacagaattcttgcttctactttcctgatatggtctacaagtctaggctgctgtgacattcaagatgactaccaattcaaaagggggacgatggctagggaccactctgattctaccctcaccacagtcttcagaggtagcagaaataattataccaatggcccaagcatggcagtcatgatgttcctacttgtacacagagggttacactcatcactgggagaacagagattcagttaccaccagaaaagcagaattggaaaccaacccctataggtattaggagcaaaaggtgagtttttaattaaaaagctaaattagaaattaaaaactgcaccatatgcactggaaaatgtggtttctgacaatatattaagcaccatgttaaaacagagtgttgcaaaagggtcttaacagaaacagagcaagaggatttttggaaaagagagaaaatggaaaaggaatagacattttttgaatatcaagcccgggcaagttagaaccatgcatcagcttttcatccatggtgtaacttaaccctcaggctgtcctactcaatgtggtttgctagcctcactcgcacacaggaagcttggaatttggaggctccaagtcactctccagagtcggtgtgcggtaggcctgcaattccaaaccaaggtctgaagccaccggaagccactgtgctttccaaaaccaccctcttggaatctgccacaaatccaattactaataagagttatttaaagtcttaaaaataaaattgcctttttaaaagttcagcattttaaaactaggatgcaatccttgtcatttctttctaatgtataataattaaaggaataaatagaaaaaaaaaggtatttcaaaaaaaacagacttttccccggaagtcagatgaataattttacatgtaagttctataactcaattcaaacacacacacacacacacaccccatccaatgtcaaaactgcaaaactcataatagtcatagtttcccagtggcacctttaaaaacatagcctcttcggaaacacgattttcggaaacacaatttctttcaccacatagctatggaaatgaccacacttgaaatctaaactgaacatttttcttcaatctgtaagtattctgtatttggacttcttccaagttaaaaaaaggtttacatgatagctcctttatgagttgtctacttttcaacatgagaagttaaatttgattaattcatatgagaacagattctataacctctttgacctgcagagataatttactcatctctcttccactactgtaacctaagaatgagcccttagctcattaagcttcacaaacaaaaacacttaggcagtaatgacccattttactattctgtttcttgcctccctttctctgtatctcagtctttttttttttttttcatgtatctgtggtttccaaatctatattcctaaattccaactcactcctagattccacttttaaatttccagcagccttacagacatcttcacacagatatccccctgggtacctcaaagttgacatgtccttaaccatatgatcttcccaccgtattcctacatgcttaatgacaccagtattcaggctgttagccattccagaaacctcagagccccttagaatccccctatcgccttccctttaccacagtctgacctgttctatagtctccatatctctcagtggccgccccttttcggtctcctcctaggccttattcaaagccccactgatctcttgcctgggatagtaaatcgcatgataacttatctataggactgagcttctcattccatcttatccactgctttacaatagtaattccagtttagtcacaaacccttgaggatagtaatttcaattgagttgagcagagtagaattatgggagaatttccctttgggggtcatttattctagtaatgtttccgtttttaatagaaaatgttacttctgtgatcatcagtaaagacaaaaaatgtacacatttagtaaggtcacagcactgggtccatgatagagtagaaacctttagccttgaacaggaggcccttcattgtgtgtctcttaaccaccttccaggctttgttcttcctacccccaccatctactgccctttctccattgttcttttgagcctctatgaccttgcaaactctgctccccattcctggaatatcctttcaggtgaactttatcttattctctttttcttttcttccccagtgtcccaaatttgctttgtcctaagaatctccagggtctaggggcacgcagcacaccaaatccatcagaatctctagggcagaaatcttagaaactggattttgttatccaggtatactcaagcaagagtaagaaacactggcctcaaaaacactcgagagacaatgggaaagaaaatttcaattcctatgtccatgttgtcttaaacatcacatcttctaactttatgatcaatgcttgtgattctcttcagaatgttttccagaataatctaagtaaaatgtctgtgggaaacaaaacagctgccactgaacctcaacatttatctgtatgcattatgtcaaggcgtgggagggggatgtacgtgtgcacagaaattcacacaaacacacagggtcacatgtatctgaaaatgccaatgtctgccctcgagtaccttacaatttgcaggtaaaaagattccttttttttttttttttgagacacggtcctgctctgtcattcaggctggagtgcagtggtgcaatcacagctcactgcagccttggtctcccaaagttctgggattacaggtttgagccaccacacccagccagaagattctttatagcactcccctcttatgacaaactgagaaagagaaattaatgtgttttctcttgcacacacacacactttgatgatgtgtctgcttccaggcagcaggaacatatactatagagtatgctttatacagtttcacacattaggcaaaatcaaatataaagttctccactgaaaaccgaaagactcaaaatctattatcttatttatgattaacttgctaaatattttgggtgagttagttccagccttttcactttcctcctgtaaagtttttaattctagatctttctttgtatcaacaagagtgttttttgtttttttttttttttttttttgagatggagtttcactcttgtcgcccagactgcagtgcaatggcatgatctcggctcactgcaacctccgcctcccgagttcaagtgactatcctgcctcagcctcccaagtagctgagattacaggcatgcgccaccatgcccagctaatttttttgtattattaccatcttggccagggtagtctcgaactcctgaccacaggtgattcacctgcctcggcttcccaaagtgctgggattataggcgtgagccactgcacccggccaagattttttaaaaagtgaaagtaagttcaaaattaaggatttgagttctgagttccaaaattattttgttttaaagtgggaaagggggtagatatcctaatggcatttaaaacacaaaatatatgaaaaggcaaaaacgttgaacagtgggtaaatgactaaaataacaactaacactggaggtaaattggctcccttaatggataaaatataaattcaattgaagtcaaaggatatttgcctatttgtggagcacgtcttctgtcccagtgactgtgcagaatccctgtagagtccaatgacctccaagcatctgactctggttaagcatggtcccccagacctcctctctgctagctgactaatgaaacctaggtggctttaattttaatttaaaaacagctcaggtcagctgcacctcctactgccaaagctgtatctgttgaggacctgtgactagaacacctgactctaataacagcacttaccatttaccaagcacttggaccctgtgtttatcttgtctccttgtaacaactccgaagggcagacgttacttctcccatttgctgagagaaaatccaaggagagaagctgagctctgaagtaatactgtctcactttaagccataaactcttcattaaactacatctaaaagatcctaatacacctggccactcactgcctgcactgatttcagaaaaaggtcttttgtacatgcaccatggcctgaacatggcgtctgttcctcttttcctatagatccaacatctcacaatgtctgttcctcttatcatatggactattcatttctggcatagaacttactatggtctgaaacaattttttgaatttcctatattatttgtctaccttatcccacacagacgcactccaacaagaagaatgtaggtcccctcagggcaataatttcaaatttctaattcactccactgtatccagtcacctgggacactcagcataataaacatttgtaaggatgaatgaagacctcaacaggttttgtgccatcatctaattctgaacagtggaagtatactttttacaaagtgtatgtaggctcagataatgtatttgctgattctttcttttattccaaggttaaacctctattctatttcaacattaatgccaggcacggtggctcacgcctgtaatcccagcactttgggaggccaaggcgggcagatcacctgaggttgggagttcaagaccagcctggccaacatggtgaaaccccgtctctactaaaaatacaaaaattggctgggcctaagggtgcacgcctgtaatcccagttacttgggaggctgactcggaagaatcgcttgaacccgggaggcggaggctgcagtgagccgagatggcgccacttcactccagcctggacaagagagagactccgtcacaaaaaaaaaaaaaaaaaaaaaaaataagatccagaaggtacaatgaaaagaccaccgactggtactatcaacatgccagaagagtgaaaatttttgaagaaaatgctgatgaattatttttactgatcacccaagcaggcaccaataattcatgaattcataattcataagacatgaattatgagtgaaggtgaaagggtttaaaaaatcccttccagttgaactggtgggatgaactactgactgagcaggcctgatgatttcttccaggaataaataaataaacaagtacataaacaaaataaagccactacagtagaaaggcagagaatagcacttctcctaagtccatgtaagcattttgactttgaattttcattctgaagtgtggctatgattcaaaaattctgtgaaagcgtaacaacccaaaaaacatacagtcctgcaatgttgaaattgctgtttaatgaagaagctttctggctcataaaaatctcaaatgagaagcagaaaggcccagtgtttgacctctggaactttccttctcattatggtgagaaacctgattttggtgtattttttttttaacattatttttaacaaactgctctgtagttcaaaaaagcctgctggcctaattaccagtccgcaaaccacagattcatactaacgccttttgcaattctctcttcctctgtctttgtttctcagaaatgggaatcccaagtgtatttaaagtgatgaaaagttgtaaaaaaccaggtagctattttggttacctgggagatggggtgggaagaaatttgaggtatctgtttgggttcttgattattttgaacatgtttcacaccttcattatctcctgtgctttgtctatgtttttgccttgcttccataaattggatagcaaacctactgggccagtgtcatcttcaactctgtcagtggacatttcctttgtgcttccttcaagaacacccatgctacaattgcaacaaggcagacaacagtggggtccttctagatccaaagaccactgatatgtctgtgggacaccatccaaaggtcatctcctccctcagctaagctcctgcagcttctattaaaacacttaccacattctaccccatttccaaaagttttatctcctccagcaggcaataagctccctgggcagggaactttcttatttctcaccatttggtgcacaaggtcttagaaaatgtttgcgaatgagatgaactgcccttgtttaataaaaagcagcaattgttcacgtcagttctgtcagttaagctactaaatttccaactctagggtcagtctagactcaggtccaacccaagagacaaggttcatgcctgaaccacaagctctctaatccgtcagcttcagagtcacattactgcaggggacccaattctcatcaaatcaagctttgccagtagatggaattaggagaggttaatacacacattgttgcaaatgtacaaaatacaaagccacttttaaacattacctaatttattataaaatttttatccacaacaaagtagagaatgaccagaaggatctaggtggaacagtctacaactttaaaaaggagtcctcaagtctgaaaaagtcattaaaaagaagtcctcaagtctaaaacagataggacgttctttctctaactaggcatcagaaagcagagatggtgcagggtaacgagtccagactttgaaaccctacagtcttcatctccaactcccatatacaaccagtatgacttggtcaaattactctgcatgtgattaatccatttaaaatccagcacctagtaagtgccaggcaccttttgaggcatggggaatacagcagcaaacaaatggataaggtgcctgccccaaaacaataggagtagggataataatagtatcttacccataggatattataagaagtctataccgagtattacaggtgaagcccttagcacagtgtctggcccatgcatcgtgttcctcaataaatagctaatacttaaagcagaggtcagtttatatacaagctagaggaaatatagatgtatttttaaacaagaaaaagaaagaaagagagagaaagaaggaaggaaggaaggaaggaaggaaggaaggaaggaaggaaggaaggaaggaaaaagaaaagggaggtcaagagtttgagaccagcctggccaacatggcgaaaccctgtctctactaaaaaatacaaaaattagctcggcgtggtggcacatgcctgtaatcccagctacttgggaggctgaggctggggaatcgcttgaacccaggagacagaggttgcagtgagctgagatcacgccactgcattccagcctgggtgacagagcgagactctgcctcagaaaaaaaaaaaaaaagaaagaaaaggaagactacattggccaacatcacatctgtcacctcactaagccccgggttggatgaggagctctggccagctgcataaatgaggaccccctcgtacccccatctccgctcttgctctggtgtctcccctgttaaagaaattactttttccattatggctggggagccccataaggtctttgatacttggagcacaaagaaggattctaagaaatctaactgtgattcctgaattaaagaggatcaagaagtcaacaacaaaggagctcaatcagagggcttataagtctttcccaaatccaccttggtttagttttgttttttgttttgttttgttttgatggagtcttgccctgttgcccaggctacagtgcagtggtgccatctcagctcactgtaacctccgcctcctgatttcaagtgatttttcctgcctctgcctcctgagtagctgcgattacaggcacacgctaccacacctggctagtttttgtatttttagtagagatggagtttcaccatgttggccaggctggtcttgaactcctgacctcaagtgatccacccacctcagcctcccaaagtgctgggattacaggcatgagcctctgggggcacctggcccccaccttgttttttaattccagtactcctttgccctgccattcctacaattaggcatgttctcctgtgttctctttgtcctgaaatacctggtatatttccattcaacttatatctccattcatacttaaagaccaagttcgtacaacaccatgtccaaaaccttcctgaactccaagatggacagttgctccttctcacctctgcccacctatacattcaacacagcctcatctgttgaatcagtctcacttgttttatgttcattctgtcattagattaccctgcttgtatgcctaacaccaaattaagagcagaaggcatagctcaattattatctcactcccttacaaagaaacttttgagccccaactctatggcgcactctgtttaatgtgctagcatatggcaatgaactcagcagtctcaaatgcgtgctctatgggacttccatcctagggaggaaatgttcctctcctctttccactactgttctcaccagatcagcctgcccacccacaacaagaattccaggcacacagagcagttgtgtggggcaggttttcatgaataaataaatccccttcacttttcagttctttgaagtgtgaagcaaaaccaaatgcctgaagccattacagtccacgtgggccatggccacgaagttctaccctgtatgccactgccttggcgattcagtgccctatttttaaaacgaagagacactttattcatcaaaatccaaacttgatacctgcagggaatgggacagaattatttcctaggaaagagacctactcagccaagaaaaactacacttccaaagtccctatccagagttttctccacgaagcttccacagactaatgccatcacatgtgactttttttctcacactgaagtatcttggcacatttacacagcccacatcacatgagccctcacttatttatatgctgccttagcatcatgtccactaagggtaacctcattagaacaaaagatagttgatcacccaggaaattgcaagggatttgggagctctgtgtaagatattctcctccaactccaatgcagacacagtgattatggaaaactcattctgcagtcataacacctcacacaatgtgaacacacaccaggcactcagtaagtgcttgttatgttttatttctaggaaaagtttttactccttacacctccactactgggaggaggagagaccaaatctatgccaaaaaacaggtaaaagtccaactcacttccagaaagggaatgaaacaaaatttccaagaaataccatctacagaataataacaatattggccacgtggagctttccatgatctcatcaactctttttaagtctattaaaagtcaatatataccttatttacatcagctcattgtgtagagttgtgatcttaattggcccttcaaaaattctgctttgccagtgtctctttcttaccttaagataatcgcagttaaacatcagggttacgtataacgccgactgaaatggattttttgttcccctttagctaacattttctgtaccttactatgttatagcaactatacaaaactacttttgtgatctctttcagtgtcaaaataacaccacaaacttgttcttctatgatctcattttatagttgataaaatggagagtcagagaaggtaagtcacacagttaatggttgatcaaaccagaactgctgcccccatggctcatatagtgaaccaagggtcagaaaacctagacctgtgggccaaatccagcctgaaatgtttttggtcttctttatgatttttttttttttgagacggagttttactcttgttgcccaggctggagtgcaatggcacgatcatagctcattgcaaccgccacctcccgggttcaagcgattctcctgcctcaacctcctgagtagctgggattacaggagtgcgccatcatgcctggctaattttgtatttttagtagagacgaggtttctccatgttggccaggctggtctcgaactcccaacctcaggtgatctgcctgcctcggtctcccaaagtgctgggattacaggtgtgagccaccgtgcgcggctgattttattttttatagagacaaggtcttactctattacccaggctggtcgaaaactcgtgggctcaagccgttctccagtctcggtctcccgagtagctgggactacaggcgccccaccgcatgcttttgtaaacaaagttttattggaacatagctcatttgtttacatattgtctacagctgctatcctcttacaagcgttgactagctgtgacagagaatgtatgtgcaaaacctaaagcatttactatctggcgcttcacagaaaaagtttgccaacctctagtcgatactatataagcaaagataagacgtaagtctcagcaaccttctaaaaggctcaaccatatcgtacacaaagtacagtgctttcaacaaaacaaaagctttctaatgaccttaaaactctagagtaggaacagtccttgccagtcatctaccttctgtttctgaattctgagtcgagcccagcgttagtaaatgtctcattactctaactcccacttagaaataaatatactcaggatattagaaatatttattgctcgcagaactgtctggtaataaagaaactgccccatcactcaaacagcaatagaagatttatcgatttcctatgcaaagtattctacttagacctaaacaaactaggggaagaaagcacaagttcaacataaaagacagatgggatggtagcagtggtgtgagcctttcttcattcacgctctcaaaccagtaaaagttagatatagagaggtccctcatccccaaatgtgcaatctggggcatgtgcgtattaacaacatagaatgtggcactgcattgcttgcaatgaaggctgcaatataactttacccaaaacctaattcatcatccttttccctttaacaatcagcctcttctatgtcatccatcgtgaatgttaccaccaagactagaagcttccatcaccaccctcctcccacctgccaccacatatacataatacgtatctgagtcctcacaccaaatgccttcctctttctattgcagctgccttcttactagataagggtcccgggctctctggatggactggatgtcttttttttttcttttcttttttgagacagagtctcactccatcacccaggctggagtgcagtggcatgatctcagctcactgcaaccttcaactcccaggttgaagcgattctcatgcctcagcctcctgagtagctgaaattagaggcacatatcaccacacacagctaatttttgtatttttagtagagacagggtttcaccatgttggccaggctggtctcaaactcctggcctcaagtgatccgccagcctcagcctcttaaagtgctgggattgcaggcatgagccaccgtgcccagcctagatgtctttttttttttttctttttgcctaactagggtcttggggtatcaatgtctcccactccatttcctgctcatcttccaggactgggtctagtttcccattcacacacctctgtggctcctccctggttacctaattcttgactctgtcaatttaaggagcagcagataaggcttagtaacttactattgatgttttggatccatgagcatcagctaaggcctgctggaaagcttcaggcaacgcacagagcacagcagctcaccaggactgaccctcacactgggcccggtggtgtgcactccaccagcactaactcgtcatgtctctcatcaaaaaatttggcatgtccactgtgccaacaaagtcctggagaccaggagggctcaagcactggccagagttctgtgggtaggaagcggtggggcaggaactcaaaccaaggcagtgactgcagagctcacacttcacaccacctcactctgcctctgctgcctctgaattccctaatactttgtattcctctgaagtgacttttagaaaattaaacctagaattacatttatatacttcccttctaaaattgaaaactcctggagggtagtggtctagttttattaatctgtaaacctccccaaatacccaacctggtacccagctggaactaaatgacgaacaaaggggtagtccctcctccaggaagtataatggaagaatgaaaaagaaaagatcgtgcagaaaatccatcaacagaatacccctatggggtctttctttgtggtctgtttataccccaacatatattcaccaagacttcctgaaaataattttgaagaaacaaagaccatgaaaaattagctgccagatttggaatggtgtgtttctgtggaggaggggcaggaactaaaggaatggccacatagagcgaccagatttcctaaggagggtaattcattttactccaaaaatggggtaaagcagtggttctcagtctggctgtgcattaaaatcgcctggggaagttttaaaaatcgccatgcccaagccaactaaatccaactccaggggagggtccaggcaagtgtgttttctgaggtaagaagagctggagtgaaggaacctgcattggaattctgactccactaattactaataacgtgaccttgggcaagatactcccctccatgcatcctttttcttcagcccagaacaatcccttactagctatgtgaccttgcagctcagtttcctttcgtgtaaaatggaaatcataatagtacttaaccctcttaggtttattttaagcactaaataaggatacatcaaagttcttagaacagggcccaggacatagagagcactcaatcaacgttagctacttttatcatcaaaggtacagtgagtttacaatacttgcctcccaagctaaggactaaatacaaagtacttgatataaaaagtacctaataaatggtgctctcttttcccatccatacatctcactcacaattatctctgaatatgtgatcgaacctgaaggccttcaggatagagaaaactaattccccaacactcacttggggatgccagataaaatacagagcatacttaatacgaaaaaatatctgctatttatctgaaattgaaatttaactggatgccccatagttctctttgctaaatctggcaaccctacattcacctgtcacctacatttaggctacaagtaaagtgggaggcagagtctagtccatggaggcaccacaatcaatcaatcaatcaattaatcaatcaatacctagcatggtgatgcacacctgtaatctcaagctggagaattgcttgaatccgggaggcagaggttgcagtgagcagagatcataccactgcactctggcctggacaacagaacaagaattaatattaaaaaaaaaaaaaatcagtacctgggaactccctaggtttgctccctggaagccataagacatcttactacaattcataagcagctctccagccttcctacatagggcaagtcaatgcattgttcagatgaacaaaacacaggaggaaactactcaaaggcaacagagggcaagaagagagaaacctttcctaaagtgacctctccattttgcagtcacttatcaaacacctaaatcaagtgaacaggaagatttgaacagaaacctttgcctcctggtggaacacacactccaaccatcccacaaggcaaaagcctggctataaattatttagccctataaaagatcaataccaaaacccaaagccatgttataggcttcaaaagtcctatgccagataggtctctaaggtatcacctgtttatttgttgttgttgttaattttattttaaccctccctttccaaaaaagctaagtttattttaccctttcaaatcaattttttttcccattagaagaaaggcagaaataacagacccatcagaaaaacaacattccagaaacctattttagagggtatttactttgcattcccagagcaagatccctggagaaatgttaagttttgaactatgtctactataatatttgtatatgtgtaaaaaactgaagattaaaaatatagaagttaagaagcattaagagccaatgagtcagccagatctatgagtggaattaaattagcactagattgttcactgattatcacaaacagtgaaagctctcctgcaaagacatgttttccagttcacttggttaatcccttctgaacaaggatccaaggaatgaatattatctatccaatggcaagctacacaaattaatcacacccaagcaccatgctgacagccaaacacaatctataaaattccagactatcgtcataagccaataacaagaactaaagctctgatacccactccccccagaagaaatcccaaattgtaaaaggtttgaaatgacactcccacatccatttacagccaactatttcagactggttagatcacataaaaatatttttaaaagaaaaaaaacaggtagaagttaattttttctttatatatatttcaatggctacaaaataagctaattttttaacagcaagaaaattaaaaaggcaaatgggcatatcattcatggatttgtgcaaaattcacattaaaacccacactgcaataataagcacatagcatcagcataatctccagtttacttagctgtgctaccacatatattagtaacctaaatgtaacctataagtgggtttgttgatttttttctacaaacagcagaaactaactcattttcctgaataagcagcagattcagacagcaacccacagaacccagaatttgttggcaaagctccgactttgcaaggtggctaataacacatggaaaagagacagcacaaagggaaagggggccagaaggacaagaaatgccccattcatggtgccctgcatccctggcacggtctatttgaatgctgctcttatgaggctgccagctttgaaagtaaaaaagagaaaaaaaatatgtgtaacttaagtcagaaagaagggagttctctgtttgctgttcttgctaagagactaaagaagacattgccaataaaccttcatcttcacgcagggaagctttttctttctttctggccaagggaagattcagtttagaaagcaaccacatcagcttaacaagaagtgtgttaatgggggaaaaaccacagttctgaagctggcgaaggcagccccacgaccgccagggctccctcgctgactgtctcggaggcacaggctgcacagggctcaaaatgtcacctgtgaacccctccagcagaagtcactgctctgtgttactctcatggagcaatttctctgaagttcccccaaatgatgattgcctggtgtgtccttcttttattcaaggtcaagaccaattctatatacccattcaccttaaggtaaaatgacatttcacagggctaaacgccaccagtttatggaggaaaagacactaaataaaggaaggtagagagagagagacatgggtttttgtctctccggctattgtcagacttgcaaagggtatttttcactccagttctgtgtgaacagaggacctgaggtaaggcaatgaacccgaaatatttgtaacctggagagggaaagataccagcactggctgaatatctgtgaggtatttggcagcatgctatacatgtatagatgctttacactcattatctcatttcgtcctcacccaaaccttctaaggtggaataataatgtgtaatagttgcagctctgaggaaaccaagacataacatggactctgtactgcctgattctaaaggctgtgctctttctattactgatgattattcattttcgatctgcctcccagcaggggtcggcaaacttttctgtgtagagtcagagagtaaacgttttgggctttacaagccatatggtctctcttgcaagtactcaattctgccattgtagcaggagagtggccagagacaggaagtaaatgaattgagtgtggctgtattccaataaaactttatttatgaacactgacatttgattttcatataattttcacatgtcataaagtactattcttcttttgatttttttaaccacttaaaaatgtgaaagccattcttagcccacagactctaatttgccacaccaggtctacaccatccataaataatatcttgattaatcttggagggaactaaagaagaagaaagatgatattgctctaagaattagaaggtggagggaggtgttctgtgctatttaatgtattttagatccttattcccatttcattataggacataagttttctccatcacacctcacagaaagaatgggaaaaaaagaatccctgctattaacatcagcagagaaggtataatccatacacacaaatatagtgatgttttggccaggtgtagtggctcacgtctataatcccagcactttgggaagccgaggtgggtggatcacttgagcccaggagtttgagaccagcctggccaacatggcaaaactccatctctaccaaaaatataaaaaattgacagggcacggtggcatgcccctgtagtcccagctaatcaggaggctgagaggcgggtggatcactggagctcggaggtcgaggctgcagtgagccatgatggtaccactgcacaccagcctgggtgacagagcaagatcctatctcaaaaaaacaaaacaaaaggaatgttttgagtaaattcagtttacatattagcatatgattttgaaatttatccttttattctcgctataaaacatcctataaattcagtttgcatcctgtgcctttcagttaaacaaaaattgaataaagccagttttaaaaaagtcacaaaagttgaagaagaattgatgggccagggaaaacacaaagtaaagagaaagtcctggcaaccctggccagggatcagtgagacacaggaacatctttccaagctgtcaatgacaggctgatttactaattttagagtatggaggtacagagttaacttaccaactaatcaatgtgttttctcccttgactgtttccaaacacggagtgctggtcagttgcttcaggtaaacccaatcagctataaacactacgctaacaatatcgtaagatcaatcaagcactaaattgctcctgaaaatatactgtctcttctggctttatttccccacctggctggactactgttttctgctgtgcatctccagcataaagcataacctcattttgaagtcaggcgtggccttgctattggcctttgaaagggggttaccatactgcacacttcctaaaaagtaaaagtcggcaagggtgtggaagcatttctaagtgtcaaagacacctttgagagtaacagatgaactagacttagaagctgggagtctttgccctcttcatgcccttttacgttaaggtcatcatgtcaactaaaccttagcattttccaatctttaataaatgggaaggggagctgaacgcaaacatgattaaaaccacttcctagaactcagaggtgaaggcaccacaaaacattggctagtaggcaatatgatggattgttatcttttgtcaatcaacttgaaatgtttaggaaagactgtcaaaaaattcttaaaacatttcctcataatatagttggatttttaaaatctttgtactctttatttcaatgaataggcctgaatgacaaaatatggataaacattttgtttttacttcagtgtctgttattctattctagttttgttttatggttacttgtatttctatcatttttctcattccagtcctaacagcagtacatttaacaagaatgccaaatgaacctgaactgctggaaggattttacatacttgtaagacaactgggctaatgtgggcatcatagtcacagaatgatatgtgcaaggccatagaagaagctccaaatctaagaggtaaaaaaacaaacaaatgaaaaactttaaaccccatttaatagccacctctccaaaagaagtactagtccaaatgattcttgctttgttctgaaacatttccagtgatgttccaaagcagcataggttcattagatcaggtgagtaaggaaagttaacaagaagcaaacgttattaaatagcctctgtttaggatagaggaggcccatctgtctgcagtgaaggcaacacaagagcttacaaataatctgccttccccaaggtacatggctccaggacacctcctttgtgtgcttggaatgtgaagaatttaggagacaatcctagactgttgcagtgttgggggatccttgtttgaattggggacacaatgcagccggctgccactcatgaccttgataagccaatgcattcatcactctgccagtctccatgctggtctcaccatcatcagagtggtggggaggaaatcctaatttgttgaagcctgacacatccctagtagcatctcctaagcagcttctaaaataatctgttgtaaaagcagcagaatgcttgggttggagaatggtcacaaactggctatgacacgaggtctcaagtgtcactgaaaagtcccattgaaatggaggtcggttctaagcccttttgtggtctgtggtggtcgttcagtgccaagaagagggagatgacccttcggccaatgtccctctcaggagttcctttacagcacaccacgactcccttcagtaacatccacttcatgcccttgatatccttttcttctgctctgttcaaaaagacttcacttttacattataatctgaagatctttcagtgggcccagagaaaaagaatcaactcagggacaaagtacattttccacattgatctttcaatagcctcatgtctgactaattttttaacgggtcttttcaaaagatgggtcctttaaaaaacaactcaagagagctagagacaggaagatccccttttcttcaaagtctttccaataaaggaggagtaatgctgttttctttaagcaaataatcggtggcctcagttacaatttaacttactgatttaaggtaggtgcaattattgcccccattttacacatgagggagctgaagtacaacaggttatttgccaaagaccatacagcttataagtggccttgctgtcaatgctctgaaccatgttacttctgctacacctctataattagagcagttcattctattattttaaatgaactccactcctttctcccttccaacactgaaatgaaaatctcatcttcactgatgcttagtctaattactaaagcagtggtcttcagtgaccccaccaaggcacatctggcagtcaggagatatttttgactgtcatgtgtatgggggtgaagaatgctacctactggcatccagtgggtggaggccagggatgctgttaaacatcctataatgtacagggcaagtctccatgacacagagtcatccagaccacaatatcaataatgctgaacagtcagataagtattttcatgacacaggtcttcctccctccattgctcttctcatttctaccattttcaccatagcaatggtctgttgagtatttgtgccccaaactagctaggaagccatctttcctagtaagtaggatttcttgcccttcccctacctgatctcccctacttcctcaagaaacctaacagatttatgtagtcccatttctgcactttgagtcaaaccattccacttcatgtaactcctatacagtcttccaagcctattccaagtgaagttttgcctgagaaggccagtccacagcaactacatcctcctcctggaatctgaacttccagttttgcaattaaagtgatgataataatcgctgccactgcattcctaccatgtgccccacactttggccaagcatttgatacatattattgctaatccttcaaacgaccctaaaataaagatactgccatctccatttttccctaggactaaagagaagctaagagaaggtaaaggagttcaaaagctttaacccaaggagtgggaaaaccaggattgaaacccacatcagactaactccagagcccagctctttccaaatgggtcccactaccaggcacagttaagctcacatacatctctcattctctcaaagtacctggaagaatttcaataaatacctgttgactgactgatcaaacaataataacctctctggggttccgaggccgctctgagagtgagcctctcattgtacaatttctcttttattactcccacacattaatgggtcattctccttgccttcccttactgtatgtatatgtatatatatatatataaattttttaacagctttatggagctataattgatatgcgataaattgcacattggtaaactgtatattttgataagtttgacatgcatatgcactcatgcatccacttccaatattaagttaataaaatacccatcactctttaaagtttttgcactctcttttccttaccatccactccaaccattgtactgcaaccactaatctgtctcctgtcattgtacattaatttgcatctcctagaagtctgtataaatggcatcctataacctatacattctttcttctctggcttcttcactcagcatattttgggatcatccatgtcagcatgtatcaatagtttgttctcttttattgctgaatattattccactgcatggatatagcacagtctactcatccattcacctctgatgggcatctgcgttgtttccagtttgtggctactataaataaagctgctgtgaacacgtgtagacaaatcaccattctctttaaaatccacctctatctgaagaagaattttgccagatcatacagctgtattaaattttgaacggtttttccagtataaagaaatggagatgagaaacaaaacctcattctctttttgaatgcataccagggcatggttttccaggacagatggctggtcttgtcatttggacccatcccttgataataactaagtctaatttcagtttccttatgtataaaatcaatataatagagcctccttcatagggctattgggaagattaaatgattattattattctcgcaaaatcttaatctcaaaccagtgtgtggcgagtgcttaataaatatgggctatgattactattaatcttaacatctattatgaaaaatgattaaccctcattatgccttcaaacagaaattcctatgatttctgccaaatttctctattcagattttaccttaagtgaccattctaccactatgacatcatatagcaaacaaatgatggtctaacacagggatgtccaatcttttggcttccctgggccacactggaagaagaactgtcttgggctacacataaaatacattaacacttgtgatagctgatgagctaggaaaaaaaaaatcacagaaaatatcataatgttttttaaaagtttacgaatttgtgttgggttgcattcaaagccattctgtgctgcaggtggcccacaggccacaggttggacaaacttggtctaacacaatgcttctcaaacctttttgaaaccctgccccctttagaaaaacaaaaatatatatacatcttgaaagaattgacacatggtgcctaaaaacacaccaatataacctttcccctgggtctaacaggacagcactagtgagaacatgctgcagtcttctaactagcagctccctgtgaatcatctgattactcattcatcagagagaaggaaatgaatggactcagtgaaacccaactagtttccaggaagcctgtgataaacatcccccctaccccggcttacattgcatcttaccacttactacctatcaggcccctaagatctaccccttgtattttcacacatgcgggcaagtctgaaaagggaccgtttgaaagagaagtacttggccctgggtgaaggagagaaaggtctgtaattcaagcctgggtgaccatccatgaggaaggctaggaaggagcctagtgctggggggtcctctggcctagacagtaagcttcccacaaaaagatggcaggtgtgataactagacatacacattatcagaagaacgctttgacaaggcaaattgtcaaggagttctaccagagaagagagcctggaagagaactttatgtatctttccaaccacagctgggaatgaagggcctggtgggcttggaaagcatagcttaagagcacaggatgacgactcagtcagacttaggagaacaactcctcacaaccaactatgccattaccaaaaagccatggaggtgtgacttggtttcctaaacacaggccctgggatacaggacaggaacgtcctccaggatgctcttccttatgatgatcataggtgaacacagacacgaaggacaggactgctctcctcctccaccccaaatcactgccctctctaaaaagcctttcctaaccctcatcacataatagatgctcaacagttatgtgctgaattgtgattggttaattcgtgaatgttcaacttccattcttatgttctacacctgggccataacaagtctcctaagagccttgaaaaggcagtcttggccaggcgcaatggctcacatctgtaatcccaacactttgggaggccgaggcaggtggatcacctgaggtcaggatttcaagactagcctggtcaacatggtgaaaccccaactctactaaaaatacaaaaaattagccgggtgtgatggctgatgccataatcccagcgactcagagggctgaggcaagggaatcacttgaacccaggagggaggcaaaggttgcagtgagccaagatcaggccatggcactccagcatgggcaacaagagcgaaactccatcttaatttaaaaaaaaagaaaaagaaaaagaagaaagaaaaggcagtcttcccactaagtagctaggattgttaagcactccagtcagtgcctaacatattgaggggttcaaaaaatgtctggtctctttaaaaaaaaaatctaaagtgaggctgggcgtggtggctcacgcctgtaatcccagcactttgggaggccgaggcgggaggatcacctgaggtcagaagatcgagaccatcatggccaacatggtgaaaccccatctctactaaaaataaaaaattagccaggcacggtggcaggcgcctgtagtcccagctacgtgggaggctgaggaggagaatcgcttgaacccaggaggcagaggttgcagtgagccaagattgcgccactgcactccagcctggcaacagagttagaccccatctcaaaagaaaaaaaaaaaaaaaaaggaaaagaaaaaaaaatcgaaagtgatctgcaccagagcaaaccactgtcactacctgggatgtttagtggcttcaggagtatattcccaaatgacaatgtatctcccaacacttccacatcaaataacttccccactcacacacagacagacacaaatacacaacacacacaaataacctaaggagggaaaatattttagcagcaggaaaaacctgtttctgtgctctaggacttctgaattaattttctaaggtttgaaagtaatatactttatattgtttagtagccacactaccagcaagaagtagaagtagccaatacctcaataaaaagttgaagtaccgcctaaaaagcagctcacactttggcaaagagtgcaaaattacaagtatgtttccttttaatgcaaagactgaactctaataactctgtagtcaagcaataggcagacgagttaagtatcaggatttcttacttatcctaacaccttctcataaaaagagaaaccaattatttcactaaatgattaaaaagaggcagacatctaagactgtttggagttcattttgttagaaagcttagacatatctttcacaattgagaagaactagaattttttttcaaaagaggattactaatccaccttatatagaatactttttccataaaattttccactcaaaaatgtttcatatatatgtgcataacatgatatagattaaatagattaggtaaatataatataaacatatggatggatatgataggtatagatctacagaaaaatattaatagatatagatatacataactgattaacgaatgaatggactgattgattgattggcagacaggcaggcagacaaaaaagtagaggatttacatggactggacccaaattaaaattgagttcagcttccctcaatccaacctccaaaatttctcttgttctccccttctgcttctctgtatgatggtcttgagtacctcccttttctccaccccaccagacccaaattttccaggaagaaagatcagataaaatcattaatctaatgtgcatgtaaattgctggtactatgctgggaggaccctaaacagaaatacacctactttggcctggccaaggcagaggttccaaatcctgatatttcaatactgtgtttcagagcaggtacaagccttttagggcaacaggggagagtagccagcggctcacggcagtatagtcctaaggatgttgtccttatttgtagagtacactgaatcatacaactgtcaacttggtaagccaggaactctcatttaatggaatacccttcccgctatggtcctggggtacggctagccatatggggagcttaatgagacttggaaagtgaacctgaaaacaggccaccactctcataaggttgatggaaacaccatgatggacaacggcaggtgcccaatggggtccagcttgtctttgctttcttctgctctgatccctgtttcttcctaacaagcggccctgttgagcagcaagggctccacccagcaccagacacatggctgcagaccacagggtttggaactccacagacacagaggcagcagcagcttttggaatgtttcatccgttccctgctatggtccctcatcagcatcctgcagttctgacctgcccaaccctacgcaagaacttctggtgaaactttctctaatcctctcactttccttcaagacctttacttccgccagctcctctactatttgaggaaggaccaatttctataataaatcccttaatcccataatactcaccatgtttgtgtttctttgactgacagctggttgataaataggataatacagagaaaagacctcaatgcatagcctctgcgtatactagtgatccatttatgaaacaacttgcaattccatgcaggtgaacacagggatgcaaaaactgttcaccaaagaacacatttctttactgccacacataggacccaaatacacacacttagaaccacactgaacctctaaaaatcttctccaaaaatactaccatcatcacaaatcacttgctaccacagagcgctcaatgagtgctaaggtttcagtatttcacaagacaaataaacaactctcaggtaaaaatgagtaagtgacttctttcttatgcgttatgttcttaccccccaaaaataaaacaaatctttcctagattccctttagtcaaggaccaatagatccatttatcaacacatcttaagccagtggtcacaaattgggttcttgcaagctgattctggcccacagacgtgtttgatttggacctccgactttttcgaatgtttgaactgatcccaatttttggaaattgggagattttccctaaaattccacatttccaacttctgaaagactcgaaggtctagtcccctggccccactttcttgcatgacaaccatctcagttaccactctgcattccactcataacatctacctgggccctgaaaataactaagatggcaaccaccaacttgtacactctcaggaagccagtccccaggggccttagaggatcaaggaggttctcttcatgtgacgtctgcatttcctcagctggtgacttgctggtaagggccatttacatttggggttgcttttaatgcccccattttccaggtcataatgtagcacagttctccagttaaaggagagatgattaagaagaggcacataccttaagcaattagggctgtatcaacatgtccaggaacaagctggaacaccacctggctcagctgcttcgtgtaaaaatcacatcaccaaagcatttggagcacaagtattattcttcaccaagaagagcaatttgaggaagacttatctgccttttattagtaaaaagacactgcctggtatcactttccctttctttacatcatgagatggtgaaaccaaaaacagaaatggttgcacaatgggtgttctcaagtgaaagggatttgcaggcaaaatgcctgagactgaaatgaggaagcatcacagagacaaaaaattccacaaaaagtgtttctgcaaactttgactgaggcacttggggtaagttaattcccttctccctgtactggttttctcatctaaaatccatccttattagggcaccatagtgaagtgaactaaacactgcacacaaaacacgtggctcagtggctggcacacccattcaataaaggctgaaattactgttatcattttattattatcaacaaagacagctcatgcaaaattaaaaacacattcaaccaaaatagggaaggtgattcccttggcagccacttcagtcacagagagacatttgtaaatcaagagtctccaagttgagaggttgtatgtgttatgatttagagattgtgtttggtttggttcaagtacaaccagcaaacacattcaatagaaaatgtgctcataaaattgtctctctctgtagaatcacgggatggctcgttacattcctaaaaccatttcataacccattgattcaacaccacaagctttttacaaaaatgtccaaacataaaaaggtaaattctcccatgatggcctccacacatctggaggtaagtggtaaaactggtgaggtcctgtggtaatttgaaaagtactttgttcaacttgcacctcattattctgcagcaagtcatctgaaagggggcatgctaagcaaaatatgaatatgtttagttggtaagccaaataacattcctagattttaaaagcaacaggctgacttctagtaaaatgttcagtaaacagttatgcatctttgcaaaagatttgtagatcaaagagtatttggattctgtgtcccttaagaaaaattaatagcaaagacactatctccgttttacagattaagaagtggagcaactggataaaatgacaagatgctttgactgaatctcttaaaaattcaaaactccaaagtattactatcttgataaggaaagaaattccacaggaaacttagagagagaaaatggcttgcaatggtacagcttcattaaaaaaaaacaagagacaccaactgtcaggtgacattcactcatttctaaaaattaactgaagaaacgtggacacgtgttccatgacttccagctttctggtcattatggtttctgcctctcagcagtccttccccgttgacacaaactccatgaaacaatcatcggaacgtctgctaaactacatggacagctcactgagttgctcaagaaatgtttaggtagaggccaagtaagtttcaatctccggttagcctagaggtccaaagatgaaaatgttgtatcctagtgaaggtgatgggcttgcagacacagacttcccaatgctgtgcacttcacgctatatacaaagaccactcaaggactcaggaagcagaggagaaactaaccaggccagccttacgtggacactattccaagactccacaaagtgagaggatttggtctaaatacatgactgaaaagagtatcaccagcttgtgaaaagacccccgtctttttcacaagccattcaaagtggaaggaatcatatgttaacagcccagagatgcgaaatattcacaaggaacagtagtggcagtaaagatgacctgggaagaataattagggtcagtttagaaagaactatgtctcaaagcctggggttttgccagcaggaaaagggacggtccagaaagcttttaaacaggaaactggcctaactggatcactgttttagacagagttgttctatatgtggactgaacaaagcaaggaaactgcatgctagactagttgccaaaaacaagactatataatttattctgtttaatgtgtctttgctactcatccttcccttcatttccctcaaacacctcataactatgactaggtcactataaattcctaaactcaaaataatatggatgctcagctttctggaacattaagggtgcaaatctggaaagaagaaggagaaaatgtctcatttctacctgaaagaaaacattaaatacaaactttttgacagatgatggtttctggagaatttttttttttaacttgagttacttttaaaacttgtcatcactgacaagcacaaattaggtggaaattcattttttaaaaaaatagacaaagtggtagaaattaagcaactggcagttatagtaaaaaaaaaattcaagttctcttttaaaacaaagaagtgcatatctgcttagtaactatagtgctaatcaaggcaatcacacatcattcaaagttatcacaaacccgtattttccattgccattcatctaggagtttctgtatgaaaggtacagactttaacaaggcttgcagtgttcattgaaagcagctacttatttttccacctcccacaaaagaagatgaggcattttcctaagctttgctgaagtgccaactgcgagtcacacaatcacagtctggacagaggtgaaccatgacaactgatgggaccacctacttcacaacattcactaacatacctgccacatgcatgcagatgctgtgctcttgttagtcttgaaaatgaattgcttcagttctctgtgagaatactgaggggtctgtttaagcatgacaaactaaaaatcctcttacaaacactgctgcgatattagctaccatccttgcttcggtttacaactagactctcctgtgagatcacagacaaattcagcagactgttttgctgtaggttttactttaagtattaacttctcagatcttacattattattatttcatggagacaaacatcatacacttagtaagaccagagctacactttatttatttacttatttatttatttatttatttattgagacggagtctcgctctgtggcccaggctggaatgcagtggtacaatctcagctcactgcaaattcaacttccctggttcaagcgattctcctgcctcagccgcccgagtaggtggtattatagacatgtgccaccatgcccagctaatttttgtattttagtagagatggggtttcactgttggccaggctggtctcaaactcctgaccttaggtgatccatccgcctcggcctctgaaagtactgggattacaggcgtgagccaccgcgtcaagtcgctacacactttttttctttttcttttttttaatactttaagttctaggatacatgtgcagaatgtgcaggtttgttacataggtatacacatgccatggtggtttgctgtgctcatcaacccatcatctacattaggtatttctcctaatgccatccctcccctagctcccaccccttgacaggccccggtgtatgatgtgcccctccctgtgtccatgtgttctcactattcagctcccacttatgagtgagaacatgcagtgtttggttttctgttcctgtgttagtttgatgagaatgatgctttccagctttatccatgtccctgcaaagtacatgaactcacccttttttatagctacatagtattccatggtatatatgtgccacattttctttatccagtctatcattgatgggcatctgggttggttccaagtctttgctattgtgaatagtgctgcaataaacataagtgtgcatgtgtctttatagcggaataatttataatcctttgggattatacccagtaatgggattgctgagtcaaatggtatttttgattctagatccttgaagaatcgccacactgtcttccacaatggttgaactaatttacactcccaccaacagtgtaaaagtgttcgtatttctctacatcttcttcagcatctgttgtttcctgaatttttttttttttttttttttctgagatggagtctgtcacccaggctggagttgcagtgggacaatctcggctcactgcaacctctgcctcccagattcaagcgattctcctgcctcagcctcctgagtagccaggattacaggtgcccgccaccacacccagctaatttttgtatttttagtagagatggggtttcactatgttggccaggctagtcttgtactcctgacctcaggtgatccacccgcctcagcctcccaaagtgctgggattacaggcatgagtcaccgcccctggcctttcctgactttttagtgatcaccattctaactggtatgagatggtatctcattgtggttctgctgtgcatttctctaatgacccatgatgataagctttttttcatatgtttgttggtcgcataaatgtcttctttcacacttttaaatatgcttctagatggagtctttgaaaaggctctcaatttcccaggaaccaacaaacagataacatttcagagactctgaagtggatacaaggaaagatcaggtgaggaactaaactgtggcaaaacaaaacaaaacaacaacaaaaaccagaccagaaaaaccaggaacaccatgatttcacaaagttgcatcaaaaaagttgtcaattttcttctttttcgtctggttgcaaatcagaaatatttaaaagttttaattcagaggcttccttcaccaaatgaatctaagaatctggtatgtgttgtaaaactgcatattgtgttgggcattcaggaaaaaaattctctgtacatttgaacttacactttgggaaattgctaaaggtagttttagtcattcacattccaaaccaagcacgaccaaaaacaagcttttaaaagttcaagcatatttgtgtattgggaaaagttaggaatgtaatatttagtgggtgggcatttttaaataatgtacttgtcccaaatcttccactgcacagcagagctgcagaaatgggctggagtcctcactctgccgctaagtatctgcctgaccttggacatgggactgaggtctctcagtttcagttgcacatttgaagagaaagaggaggtgagaagaaactggacacaaaaagtctaaaggccattccagttccaataaggttactgtccagtactatcttaaaagttctcattcagctatcacatctgtttgaaaattaactgtagagatatgagttaatcaactatagttggcccttgaacaacataggtttgaactgctcattcccacctacatgaggatttacttccacatctgtcacccgcaagacagcaagactaacccctcatcttcctcctcctcagccctactcaacatgaagacaatgaggaagaagcccttcatgatgatccacttgcacttaatgaatagtaaatatattttctcttccttattattttcttaataacattttcttttctctagctttatttatttatttatttatttatttatttatttatttatttattagacagagtctcactctgttgcccagagctggagtgcagtggcatgatctcggctcaagtagcctccgcctcccggttcaagcgattctcctgcctcagcctcctgagtaactggaattacaggtgcgcaccacccacacccaaaatagtttttgtattcttagtagagatggggtttcaccatgttgaccaggctggtcttgaacaactggcctcaagtgatctgcccgcctcagcctcgtaaattgctgggattacacatgtgaaccacagcgccaggcccagcttgctttattgtaagaatacagcatataatatatagaacaaacaaatatgtgttagttgaccatttatgtcatcagcaatgcttccagtgaacaacaggctattcattgttacgttttcagggagtcaaaaattatacatggtttttcagcttcacagagggtcagcaccccctaatctacattgttcaaggaccaactgtacttgtagataaagctaagctttctggaaataaaagttttttaaaaaattaaaagctaatattatagatgttttgctacccaatatgtgcttaacaaacgtctgctcataaatgatgaagtcaaatggggaatagacagctgccgtctgtaagtctctggtagattgtttgtaacatagccacaattctctccctaaatgcacactgttgaacaatcccctctctcactgactctaggtttagccaggtaacttgctttaaccaaaagaatgtagtagaaatgacactgggagactctcaagtctaaacttcaagaagtctggcatttttgaatattgtcatcttggggcactggtgccatacaaacacacctgagctaactggctggagacgtcttcctcctggagtacctataccacctccaacactgtgtctggctcatagcaagtgttcattatactgcggttcttacttatgcaggcatagcttggactagctgaaggaagaatgtggtgtgaagtaacaaagaagaatgaggggaaggaatacatgggctggatggaagcaggtgctatagcattcactggatgactgactgcttgagagagccactattctgttccttgtctaatgaactttccaggatggacatagtacataacagagcctagctttaaactagactatacacaccatagctgaggaaatcacaccaacgtgaagcggtttcatcctacatcaaagcagtggtcaagtcaatactaattggaagttgcaagaattatcctctctcaattattaaattaacgatccagcaatcttaactcagcaaggataagaccagttacatgctacttggtttttagaaactgcacattaaatcagaaacctaatcttaacataggctacttctgctaactctcttttagcttggtgacatttgtgttgattcatgattcataagccccatgctgtaagctttgcagggctggatcaacagagtgatggctattaaagggaaataaatcatttattttcccactgtggaaggtaagcttaagtcaccatctacaagacatagccatggtggcacattttcagagcatttgcaatattagtaacaaaactgcaactacaactttctgattacctgagaagggcccccactatatatctagagctttagaaaaacactttcatttaatcttcataacacctttcaatggaaatgttattattctcatttttactgctaagcaggttggttcggcaaagctgtgtggccacagagcttacagtgccagagctgagcctggaatgcaagtctggcaaactccgaagttcaagttcttaaccattcttcaaacaatgtggtcagcctcttcttggcaccttgaaagaaaactcaaaaatgtagacatgcttttaaaatcctgtcttacagggagatcacaccagtttttgtttgttttaggttccaaggtacttgtgcgggatgcacaggtttgttacataggtaaacatgtgccatggtggtttgctgcacctatcaacccatcacctaggtattaagcccagcatgcattagctcttttccctaatgttctccccaccccgctctcccccgacaggccccagtgtgtgtgtgttgttcccctccctgtgtccatgtgttctcattgttcagctcccacttgtaagtgagaacatgcacagcagttttttttaatccccatgttaaatagtgtggctaatgcaatacattcaagataaatagaaaccagaagtgaaaaacttgcctaacacctaaacctggatatatatttcctatttttaggcggcagaatatattacaaaaaacacattccaagtacacctgcctgatagacaataaacactcaaaataaattttaaaataatctttaatggtaaatattttttatattcaatagacaagagactttcctcaaattttttagaagagttgttttcattattactattaccattgctgttgtgttactgctgttatttattcagtccaagcctaagctgcaagaagctttagagcttccactattgcccttttgggactctagtatcacgtgaacaagctaatctgctggagaggcctttcccctggagtacctacacccccttctagcatagtatctggttcatagcaagggttcattaaatggcagttcttatttacacaaacatagcttggactagctggaggaagcaagtcatacgaaataacaagaaagactgagaagggacatactagtgtataaagtaaaccacttagctctttgcacttgcccatgacttgtcttgatcagtatcctgtagcagaggttaacttcccatgtgtaatactttacataaagagaggcaacaatctgtcacttttagcttaaaatttctacaaacagaatcaaagagtggtctcactctagcagtgtgaatcactaatagcaccctcccacagtgctcttcagcccagtaccccgtctattcctcttgcttattctgattccatttcctcctccctgggctggtgatctcaactcctgctaagcaccccctcccacttacaaatcatgaaactacaaacattctcttatgaagcagataagagagcaaaaattacactttggcaaagtgtaagtggtaggtagcatgtttggaaggactacagatctagagttagcggagatagaaaaagaggtgttacagaaatcaaatgaacaccaggaaatggtatttgaatggcaaacttcatctttggaaataacttcacaccacaggttaaaggatacttgtagcaacgtcgtaggcattggcttgggtttttgtttttatttcttttttttttaatctactactggacatcatggacagtacaaccaaatgattcatgcaaggaccagggtgaaaatctacctgtagtaacaatgtaataatacagtgatcttttcataaagattagctatgatccaggccactgatccaggccataagaatttcagtatccacatatgtaaaaggttttctacaacaatcctatgaactagttaatatcctcacatacacattttacttctgagaatgaggctttaagcagaaaaggtgattatttttatattgagagccatgtcgtcaacagcagatagatctgattatgtccaagtttaaagtaaacataaaaatatttataaacttcagcaaatttgatttatacagtaatgtaacaccgatggtgcgtttttactacaaaaatgtatttttgaaaattgttatttcacttaacttttttctgatagtcccaagattcttaaaggacatcataaatttctgtgtgtgtgtgtgtgtgtgtgtgtgtgtgtgtgtgtgtgtgtgtgtgtgcatatcataagtgaatgcatgcatacacatatctacttagagtaaacatacagttatttaaaaaaaatcctcccaaagtatgaaagttccttatctctgctatgatttgtttcgatcccctcaaaataactagtgtttggcatacaaatattttaaagttaatgtaaattaaaattacttctcttttaaaactatcagaaggtgagataaattggatctcacccaagtgtttgaaaaatcaaaactgaaaataactgatttagggaaaatcggaactgatctataaagaaagccataatttttaaactccagtattaatacaaatgcaaataatcttttaaactttaggagttaagaccaaacaaattcttttatgacttaattaagtgtgaattaatgggaattgtattttatcatgtacaaataatatattagaatcacaagaatagcagacaggagcgggaaccttctggaaatctcccctgacataaattaagttgaaattacttactgcaaatggaagctatgtgtaactgttccctccatcctggctagaaaagggatctcaagaggtatgagcactaaaaagggaaaaaagactacataaaatagccaatctaaatataaaaccatatgaaatattaaggatgcgatttgaatgttcctgaggccgttttaaagcctccatttgtgatctgaccctttcagaataaatattaatttgttttgaagtagcttttatgaacaaaacagcctctcatttctatcatgtaagtgggtgtagtaaacatagttaagctgtgaaagtgagaatttaaataaataaaaatagggtcaataaaaagctacttcagtccacaaatgattccgtcattcaatttctgtaaattggtaggtagagcattttgcagtgtctgtcagcatttccatccttaggactgaataaataattgaagaataaataattgtgccagtgcctggtctcaggggccatttttatagattgccatctaatgatagtacctcctgcgtgacactgtattaatatgggataaaattacatagttctttgtttgcgctgacacagtgatgttacaatgtcctttactattgtctggaatacaaggcagaggtaatggtgcagtgagttttttactgttaaaatctccatgacggaaagagacagctctgtttgtgtattccaaagaaagtaagttggcaatgacgattaccatcgcaaaagtagtaggggggcaggggtgggggaggagtaaggctaagaaaaggattgttttgattacaaatgatgagtaaggctaaaaatagctcaattggaagatgatacctctttagcttgctacaggaattcttcagacccctctcctctcccatccttctatccacccattctacaaatatctcacaagaaacgaatgctgcacttggtactggagttttaagacttatcaagacagaaacgttccttttctgtccaatttcaacaggtctctttaggtagagaatatgataatgatattgttatttttaataaacaacagctcccactctttgagctcctattgcataagaagcacttaaatcttaaaacagcatcctgtcccattttacaaaggagaagctccaaaagatgatgcaccttgcccaaggtcctaattacacaggtgagtaggttaaaagaagccaggatgaaaatctaggttcacttcccagaatgcaacactgcctctcctagtctaccctcaccacagacccaccaaatcaaaaagaggaaggaatttatcattactcactttgggcaggtattagactccccgccttggttccctcattttgcaaaatggagaaaagcatacctatctcagaggtacacggtgagcatgaaattagttgatacctgtaaagctcttagaccagttccctgacctacagtagatacttagaaaatgtttactattaccatggcttcaaaaaagcaggaaaggaccaatgatactgagcatgctttaagtacatatggatgtatgaaaccattctgatttaggaaactgatttaggacattagaaatgttgtgagagccattttctccattccatagcacataatctgctctacataatttagcatttaattatatactgccttacattgttgcctaattgtctgacccagcaagactctagcttaccctaaggggggagaccctttttgcttctctcgtttctccctaagcccctgtgaccagaccgtcagtacttttgacttaacatcaattaatatttgcagtggaagttttacttacagaaaacataataggatgagatcgaaagcaatgtggaaattggttgattctggagatagatctggctgcacattttttctgttcatccaacttaatcataccaacatcttagcttggccgtgtcttttttctgttcttccatcatactaacatctgttcacaagtgtgttgggattttagctaggcatttaacaaaatgtttcaagtcagtttcaaggcatgataaagaaatcgagagaaaaacattattagtgggaactcttacccaaagggacttactaatgggttacgggaacccaaggcaggtaggtctacagagatgaattgaagggttctgacttgccaatatagccatccaagacacgaggagcacgattaccaaatttgaaagaagcctgaagtggagcaagaatgacctgatactggacttcaggggcagatgccaatattatctcatcaggctggaatttgaagccaaatctattaagaatttcagtatcgaaatatgtaaaagttgtagtgaagtccaccagaggacagaggaaaatatattcacttagtagcccatctaggagtctgtacaaatttttagttgattagaactatgttatacattagtgacatatgctatacattagtgacatacgctaactaattttaggttactcaaagagaaatgaaatgacacctccatcggtgaagcatgctgtggacggcattcatcagaaatagatgagctctggcagggtgcagtggctcacccctgtaatcccagcactttgggaggccaaggtgggcggatcacttgaggccaggagttcaagaccagcctggccaacatggcaaaaccccacctctacaaaaaatacaaaaattagctgggcatgatggcacgtgcctgtaatcccaggtactcaggagtctgaggcacaagaactgcctgagcctgggacgcagaggttgcggtagctgagatcatgccactgcactccagcctgggctacagagagaggaaaggaagagaagagaagagaaagaagagaagagaagagaagagaagagaagagaagagaagagaagagaagagaagagaagagaagagaagagaagcctcttaagaaggatccagcacaaataattccttatgcagagagggaagcattcatgcccattcatttcagaagaatgactgtgtatcatattaataacatatagctatgacttactgagcaattactaaagccaaatactgtgttaagcattttatatggatttccttctctcatctttccaacggtcccttgggacaggcacactccagcaggtatgacttcattagagaagggaggagggttcgcctggaaccttccttctcagttaacacaaacttttcaggccctctcccagcctcacctttcagacgcttccactcccgcagcacaagagcggacaaagaattaaggaaaaggcaaaaccggaatgggggtggggtgggagtgggggtgagggtgaggtatgacagaaatggagaaattagataaataactgcggggacggggagggggagggaagaaggatgggagatgatctaagcaaccaataggaaaatatgcatttttctgagatcaccaccacaaaagttcagaggttgctccagacacggtaaatcttttcgtgtcttcagaagtcattttctgtcccagacattcgccccttttcctgttgcaaagagaaaggggccagcgacccgtgaagagccaggaatgcatccgagggagctccagctaagttgcagggaagctattgtgctcccgtgaagttcaaaggaaaggaccgtctgtccgggctgctgagctgtggtgcaggcagagggcgcggaggcccgggccaggcagagccccacgcgtgtccggccccgcgcaccgcggccaccaccttagttgcctcgtagggggctacgagagagagagaagagagaaaaaaaaaaaaagtccccaccagacgggtgagaacattgaattgagcgagcccggggctttgggatccggccaaggggtgaggggcgagatatttacatttctccaggcaagagaaagggagagctgggggctggagggaaggctgggaaagagtaaaagaaaacaaactgctttttccattaaatattcatgacagcagctttgctaaggctaatggaaagcatataaatccctttacaactctgttaaatgcaaaacgagaaaaaaaagatggatgagggtcacagcttgctctgggcaaattggaaggaatatgaaaatctggaccacagaaggctggaagctcagggagaggagagccggctgtgggttttattcagacccgtgccagtaggtgtagataccagtctcattcatttcccatcactacaataaaacactagtcaacaagcgggttttcagtaaccccacactccgaacaggcatttttcctcctacaattttttgtctcagatataatgccatggttacatctgacagatgttactgctttaaatcctgcttcaacactgctctgatttccaggagcacctgcaaaggaatctttgggcaagtgcccaaattcctgggcccagagagaccaggctgtgcacagtgttggagtctgacaagggacagtatctgggaagatcaagtctagactcaccccaggccactctagttttaggcaccttgaccgtgttgtgtctccattcccgatactgcagctggacaaaaggaagagaggctgatctatgtgttcctcctaaggatacatagcaggaggagtgtcctctaaggcacagaaatgtttgtaatgaggggacgctgcaccctacacagtgtttctaacgacacaagtttctcattatttaaacaatgaaagaagttcctttggaagaaagagttattatttgtactgcagtgggtcattgttctgggttttggtttttttgttttatagtttatatatggtatgttaggccattcttgcgttgctatgaagaaatactggagactgggtaatttataaagaaaagaggtttaattggccatggttctgcaggctgtacaggaagcatggcagtggcatctgctcgggttctcctgaggcctcaggaagcttaagtcaaggcagaagggggaacaggcatctcacatggcaagagaaggagcaagagagagtaggggagaggtttcacacagtttgaaacaatgggatctcatgggaaatcattgtgtcctgaggacagcaccaagccatgacggatcagtccacatgacccaaacacctcccaccggaccccacctccaacattggggattacatctcaacatgagatttaagggggacaaatatccaaactatatcatatgataaagagaaaacaaatacatacatggttatgctttggatagggagtagatttatatatccccactgagataattcaggggagagggaagtatattcctaaaacaaaacataaagcaatattccaaaagaacctcccagaaaatttgtaagttgctttataagagttatatgatctcaaaggccacaaaacacaaagtcagctgcttttacatgtacatgtaaggtatcaacaccgataaggttttgagaaagaatttcactttccccattagatccccattccagtaggaaaaggggattgtgtcaacactggtgtttagaacatccactgtaatcattttgtactttcattctagagaatgtagatataattggctggtttggatgaattttaacaacagctgtaaacgttagtaagttttcaatgggtccctccatcactgttactcccaaagtctttgtgtatatttccactatcacgcagtaattattcctttcaggaatatgtctgtctcagcccctctccccgtagaacacctcctcaaaggccttgaaggccaatggctgtgttattcaccctcatgcccagaagcaatgcaagtatcttatgaattcctcaggaaacccaatccctgccacaagtgctcacactgtcagtgctcacaatagtaagtgagctcctattacaaagaagggtctgccgagtgaatatttgatgaaatttttaggaggtcgagatgcctttgtttcttaagtaaatcaattacttattttttatcttgtatttcagttatagaattgactgcaactggatgaaaattatacagtaatttttctttgatttcatatagatagaaaatcaagaattattaatgagcaaataaaaatagagtaataataaaatatttcttttttgttgtttttttgaaatgcttggaaagcaatgttacaatttaaaactagagggaaaggaagggggttgaaaatcaatctccagacagaattttcaattaaagaaacaacacacagaaaagtccaaaaacaagttcatttttcttccaaaaagtacatttcagagttttttttctttttaaaataacataaacaaatgattctaccaagtccagaatttctaggaggcaagacacagtcctttcaaggtagtatgctaggaatgccaagagctctgctgcatatgaaaaaggtcaccaatgagcaaggagcttccagctccaggtattctcaagccttccaggaccaccaccaggctttccacagtcccctaggccttcttccttactgaggcatatgcagccaggattcaactgagaccaacctgatcaaattcccaccaaaggaggactcaatgtatatgggaaccaaatagaataaaaactgtatttccacagttattgcaccatagatagctctccatacacttctatagcaaaaatactaagtccttactgctacaagagcctatcctgaaggatccttaaaagcagcattaccttattgcatttatcatcaaagcagtaaacacaaggcttggtacactggaagtgctcaataacatttgtggaatgaaagaacatggcaaaagaaataaggaaaccaaacagaattcggcagaagatttaggtcttaattattctgaaaagcaataaaaacagaattaacctagggactctaataataaatatcaaacaaagtgacaataaattaacttcacaattaaaaaaatgtttttaaagagttaccttttctacctagtattcctggctaggtccacactttaacaaatattctttatattttcattaacaacactttcacattcactacaattaaaatcagtacttacagcctatattataatttcgattgtgttcttttttaaaaaaagaacatttatgaataccaaaatgcttctgttataatttgagtgctcattctgtgtactactggcaacagactattcttagtagtaatcatattttgtatttctttatagttttattattcaggtgtacctccctagacactatgatttagtcttggccattttttaaaacaaattttttttctattctttaagtcactttgaatctacatattccttttccaactccttttttacacaactcactatgtatctgttgaagaagaacaaggggcatttgaccagatttttcctgtttatttttattttattttatttttgagatgaagtctcgctctgtcacccaggttggcgtgcagtggcacaatctccactcactgcaacctccacctcctaggttcaagcaattctcatgtctctgcttcccgagtagctgggatcacaggcacaggccaccatgcccagctaatttttgtatttttagtagaaacggggtttcaccatgttacccaggctggtctcgaactctgacctcaattgatacacccacctcagcctcccagagtgttgagattacaggcatgagccaccatgcccagccaacttttcctttttaaattttactaacaaggcttcctaggtcatgaccattttttggtgggaaaaaaaaaaaaaagcttagtcccaaaggtcattctgaaagacatttacatcataaatacatacgtcatctttccacaaatgaagggtaattaaacaagggtaaacatgtagcctttggttatgttacatcacataccaccatgttgggaaattttaaattgctcctattcataaatagggaaatatgagtcatagatgtgtttagttaaaaaagattaaggaaaaccaagagtgagacgtgcacatatgcaaagaaaaaaaaagtctcaagtgaaagacaaattgttacaaagatcagacttttgagaacacaaagaacagtcacactgaattccattcaaatattaagaacctaccatgtgcaaaaaaagtgctgcaaaaacacgagttaagattttaagttccattaaaagagaagttatgataaaagcacacacacttaatgattcctgtttttgctgtaaaagttcttatatgctataaaaatgttactaaaaatacgtccctcatagacaagatttttcatgagtaaaatgaacacaattagatatactgacgaatcaggaaaatagtcatcaaaaacattttttaatcaaagtcaattctgcataggaaaaaataattttaagggtacaaaaagcaacatactgaaatattaaggaaatttgatctccttatctttaaaaataatcaactatagttcaaacaagccgagcaaatgggaagatactaatttttcaccatgtccacaagttggaggctaatttccctctgtgcatgaagagtattaattactcgaataaaacctttttggtaaagcttagagttccttttgatgtcaaaaacacagaaagttcaaaggttagacagccactcaacagtatgacaggcctaaaacctgaacaggaaactcatttctaaacttacccgtaaggtattgcaatcctaaggccagagtggccaggcattgttcagccggctggtgtttttgtactttgcctaaggatttattcagaggggtgacaatacctgcctcatcaccaaggagaaacattcttttggatacaaagaatcccagccatttcttctaacaccgcccccacccccaccccacccactaattagtttctcaacattctggaaggccaaagaccctagtcaagttgaatagccccggatttagcccacattatgttctatcttgcacttcacacccctcccaaaattaaaaagaaaagaaaaaacatgaaccacattggatgtagtcaggaggaggatggctgcaacaagatttacttggaaataagaaataacttcaatagaaagaaagaagtggctaatcatatagaaaaggtgtcatttacaaaaggttaccagaggcatataaactcagggaagccagattttggcatacagtgtgagtcattcccttattcaataaacattccctaatgcctccaggcaccctgctaggcactggttgaaaaggcaaaagtggtctctgttcccaaagagttcacaatgcaacagggatttgaactggaaatatgaatatgagtatctgtttggtagagacctcagacaatcatcaaagcaatagagaaaatggtatggaggacgcctccacaaattcagatcatctgtgttttctgagttgttcagctgataaatgtgacttgccttttatcatcaacaagaacttcgtaccaccctgaaatctgatcaaatactgtttccctgaaataggagatatcatccattttttaaccactcaaacttcttctcttatctattaatttcaccattctttagattcaatatatcaagtctggaaactaatagatgaattaagtaaataactgcctttttttttttacctcccataaattggatccagttatcagcaaaacactgaagttccctgaagaagttctggtggagactgaaacattagtttttaaaggagattagttttaatcaaatacttaaccttttatatcacttgtagtttaaatggtattctgcaggcgttgggcataatcaaaatgaaatgcatttttctctgaaggtagttcttttaaaactcggccaataataatgccttttaaagtgcaaggatttttgccaccgaaagaacctgagcaatgaacttaaaactacatttttaagtatatagataaaaagcatacctcatctattataataggtggagcaagtgttggccctcctttactaaatacagaagtctcatactatgagaggcacttcaatgcagtgggaagtcataaaatgtggttcccattctggtttcttcactaattaacacatcatctctccatgtctcagcttcctcataaccctactcttcagcaggcagataagaccattaactcttttggagggctaggggggagggtggagtcctaaaattcaatggataataaaactagttaatatttagggagcacttatcttatgccaggcactgagcaaaatgcttttcattcagtatctcatttaattttacagagcagcactaaaaagacagataccagaatcaccattttaccgatgaggaaatgggggcttagacaattaaatgacacgcaaaaggatatcaaatactcataaccactaacctcaaccatttccccaagccttgaagttctcactaggtcatgcaggtaaccagattccaactgatttttaaaatacactgttttccagaaaaagaaacattttgcagtatttttacataagattgctgaatgtcaattctgcatacttttgcaataagaaggtttcaatcaaacaatttctctctttgttttagctccaagtagatatactatgcatagataactgcttctaaagtcagagcagtgttctggaatgcagaaccagatcatctgctaggatgtacattttcatccccaatgtctacagaacaggtatttgggggtcttacctttcataaagtgttttcatcacagaagctgcccccaaagaagatgaggaagcagatatctaaataactgtacctcttcctcagtagtctttctgatctttgcccatctgcctttcatccctgcatatactgagtcccaggaggagatggggaaaaggggattacaaagaaattgccactgtcatttaatgaattgatgctggcgtgcttttaatagccccatttaattgtgcagtcgtattttctgcagaagccctcctaccactaatgtattaacagtctcttaccctgccccggggaattacaactgctccattttctcctctttcaacccagtctgtacattatttgccttcctcttaaaattgtcacaaaaaccgagagcaaaacaaaaaattgcaaggttttagccagatataaggtaaatatatgaaaatatggcatttaactgctgggggaaacaagagtcggggagttcttgtaaaagaggagtgtgattaacagtataaaaacgatcaagtcctgcggccacaatcatggggacaagaaatgttaatttcccgttattttaaaaccataacatcattgactccattacagagaactgatggcaacatgtgacctcagactaggggaaggggatggattttctcatcctaagatactatgccaggccaaaaataacaaaatgcattaaaaatagctgaagtcttaactgaggcctgttgtatccagggatatatttatttctaaactttcgcatcatgcaccataacacaatgcaaaaagaacaattctcatgtaagtttcactattgtcctaaaaagcattgttcttcacatctgagaggaaaaaaagtttctaaaactagacatcatgaaaaggcatcttaagattacggctggaaatcttttgattttattatttggaaaattctaaatttattttccaataagatctttctgttctttccccatcatactaatacgaataaacctcccccaaaataaaaccattataaggtgacaataagattgagtaatccaaaacaaggatattttagcagatgtccagtttcttttaacaagaaacagatgggcaaaatttaagtaaatgtggggtatcaatttctatacaacaaatgagttccaaacttacaggtaatgcaacccaaaacaccaggccaagctaactataattatatagtgagctgaacacgttttcttttaattccatttcaaatggttttctcacacgtctttcctacccacatgcccggtgaaatctctgctggtcttctggacttcattttaatttccctcactcattctaaatttcttctgaaattgaaaatagagaagaaagaattaagtttggagcgagggaaagaaaccagaaatttcagaacagtaaggccagcactactgattacactctcttccaatcagtttctcaatctctgtcaccaggatacgccctggagtatgtacttatagcccaagacatttttacacctcttatagttgattgacaagaccaattgacagttaaactggtggggcttgcgagatggagaaacagacatatctcctcattttaagcatacaatttgataaaattccatctcaggatataatgatacttttagctaaactctggtcttgaggaatttaagaaccaaatttgaagtttagacttgtgaatgagcctaggacacaaaaagcacttaataaacgcatactcaatgcctgagtgaataatctacagaacagtaatctccacaattaaagaacatttatggaagacactgtactatttaatactctccatcgagtccccattgctcctattatatctgttatgaatatatcttcttcttatgtggctaatcacccaccagtcaccataagtgtttaatgattcaggttgtcaaggccagcctggccctaatccatattctgaatataaagaattcaagaactaaacccagtatcattaggcagacaggttctctgcctatgccctaggtgacacctcaacacctctcttcctaatctagtttaataggctcctaagacgccacaccctttctggtgttcttactgcccagcacagtccccaggacatagtaagaagctcaatagaagttttctaaactcaagaatcaagcactattgaccaagctattggtcaatgggtctcaataagaaaagagggaggcggggcgcagtagctcatgcctgtaatcccagcattttgggaggccaagacgagcagatcacttggggtcaggagttcgagaccagcctggccaacatggtgaaaccccatctctaccaaaaatataaaaaattagccaggtgtggtggtggacacctgtaatcccagctactccgaaggctgaggcaggagaattgcttgaacccgggaggcagaggctgtagtgagccaagatcatgccactgcacaccagcctgggtgataccatcaaccagtctggtaatgatttatctttgacctagtaatcccactggagtggatcctgaggaacttatctattagtttggaagacaaatgaggtaatatacaaaccactgatctaatcaccaagctctctcagtcaaactgaatgggagagattcaagatcctcaactaggacttttataataacctagaccaagactgtctggtgatcacagagtatacagagttaagatgcaaggaactctcccaagctagaataaataggacttgctaaagtgactatgtcccagatgctacctcctgggatcaactgcaagtcgtgtcataggaattatcacagagcacaaagtctgtactaccatagtacttgtcataatgcatcttgttcatgcttggttgtgtgcacatccatctctttcactgggctgcaggctcaaagactgcagggatcagattttcatgcagcaattcaacaaccaagcaagaaaccaagctgggcatgttatataattcagtcgttattaagcctgcctgacagagcatcagggtcacttgtaaaaccttcaaaacccaaatgcccagagcccagctcctcgaaatgctgggtccacatatgtcagtgttttgaaaagtgcttaagtgactctgggagcacagtccaggctgagacctagggcatggcattagggaagcgtttgattccagagcccagttcatgcggtgttcaaatcctactccgccccttatgctttgcacgactctgggcaagtcattgaactcaagtcttggtctcactttcctcatccgtattaataaaatggagactggcctaatgtactcaaagagcttttgcaaaaattagatgaaatagtgcatgttaagtatactgccttctttatccacagtaagtacttaatagatgacagatattcgggctgggggcctaaagcccagtgccttacacaatccatattgtattacaatagatgtttatggaaggaaatgggatgagcctttatggctaacaaggtacagatgtttcgattgttaagcatcatacaccatcaggtaccactcttcatccaaagatggtgtgacaaattgacaaagggttaggaaaaagtgtttagagagaggtgggtaaattcaacttggctatcaaatgtatatcatatagaaacaaggatgctgaggttattaaaataacctatttgctacagccttggtgtctgtcctctctcccatgggaacaatgggaggaagggtgagcagaagaaagagtaacaccctccaggttgtggtactattgtgtgttgccattttgttattaaagccatataccatagcttaggcgtgggggacaacaataagtggcatcgggccagcttcatcagaaggttagtatttcctatagatttatggtacctaaagggttgttttgtttgtttgttattggggctgtttttgttttttttttttttttggttgattggtcatcttaccaaagaatatgggaacatactatattcagagcctactgaaagacaatgccatttttacagtagaagtcactggggaaaaacaatttgcttaataaacattcactttactgcaaactttaagggaatgcatccattacacaactgggaacaagagccacatgttcacatacacatatctatcctatgttactcgtgtgtgtgacggaggcaaaaaaaaaaagcagtgtttttactgaaataaaaatgtacctgttttgttgcagagccttgaaaaagaaaagcttaatccactctgcattttcacaagcaacaaattttgtgtcactgtgtatcctctgataatctattttaaaggaacatttcaagcaccagaaaaataaaagaaaaatatcccttagatgaatctgacttgtaaataaggaaagctattaagtgcttactgtttttggtctctctatcataaacactataaataatctcagaatatacagctcatctggccctactcagcgaggcctcatttttttagtaaggaaaagcacacaatactggctaattttctggtacccaatcctcatcttttaaaaataaataaatgaataaaaaggtgggaagaggaacactgtcaatcagataaaatagaaagtctaggaatataagcaagtcttgtgtattgcctatcacgtacatggctagttatatttattgactgcctaaaatttgtgaaaggccacctccaaaatttcttgacatcaccagtatttttatggacttgggagcctctttaggtaaaccattttaggagcaagagtacagaaataatccatcctgaaaatgccttctagtctaagcacctggcataaagctattgtgaccagtgatttcatattatggccttccacacataaaggaaatgctctgaatcctaaggactaattgcacatccacagacttcctctttcaacagagcttttaattgggcactttaagttgccaagtacgttcaaaaatggtatttccagtaagcacgcaaagtgatcttgaattggaatattcagcttccctttggatgaggaactgatgcacttattttaagctgttcattctctagtagatgacaacatgaagggagaaaccgagaatcttggtctatttaattcagcttgcattcataataatatgaatgtttcagtataatttcaatgcaaaaagataatgtaaaaaggggttagaaatctaaaattagaaaccactactcaaacaggatataaatattagatatgtgtacttctacttcctgtaagcaattagttttgtagtagacagaatgggataactatttaggagcttaattttgtgttagactaggttgtttctgaaacttccctcctccagtaaaaccccgtgttttgattcaaaagaaaagggtagatatcacctacaagactctgcaacatcacacaaccacataaaactgtcaccatgaaatactgcgctgcatgattctgttactgcttcttttattcttgcagcaatggacacacaacttcagaggatgaattcgccacttcaaggctcgtgcccagcgctggatagaaacaatgaaaacagtcttgggaacaggagcccctagggatgtgggtactgccatccaatctgacagcaaatacacctttgaattaataattttcgtacttcccacactctgaattttttttcctgagataagaatattcctctattcctagaaaggagcccaaccctgaaattgaatccaatgctacaaaaccattgaatcgtttcatcagatattcacatactaaaactaaaactaaaaccttagcttcagattggaggtacagttttcaaaacagctattagacattgtcagggatctttaaccaaggatcagagctctacaaaccctataaaaacgtacgtagaagtttgatgtgtacttttctggaaggcggttttagaatccacagagtgctctctgacctaaaaaagtcaataaccaaccataaagttgtttctttaattatgctggggagaaaaaaatcataaagttatgccagttgaacagaatattgaaggaaaacattttccttcaatctaatgtgtttacacagaaagaatttaatgacaaacttttactacaacagaaaaaaaattttttaataaaagataagtttgattcatgcatgtaattgggaagcatttgttcttattgttgttacatattaatgtacaaagagattctttctcctatgaatgaacataaaaacctggtagaaacaagcccattctcaggcttataaaacaagcctttacagataattatgttttattactcttcattttatggggattgtgttatacaaaacaaataccagacgcctatttgttttattcgtttcagggcaaaaaaaaaaaaaaaaaaaaatcctacaagtgcctctgtgaagagaactgcttttaattaaacacaatgcacaaggagcacataaagttaatactgtttgaagccagcaggtagagagtaaatgcattgaacagcaactgctgaatcccccttcttctcccggctgctgcactgaaaacattcccaggcttattacttgggaactcaaatcagcaagggatactggaacaaggtcattcatggactcatcttggggaaactaaagccaatgtccatggacatgttaaacttggaagtgagaaaacaaaacaaaacaaaaatgtattttaagggcacctgtattaaaccagactgcacattaactcttctttatgaaatcgggtagatcccttctgagccatttggctaaagctgttaagatggaatgaaccaggttcatttctgctacatcaaaaaatgcaacgagatttctggcacggttcagacttaatctgcagccaccacagaaggacatgtcaaacagtggctgctatctgattaatatagtaatgcttaaaaaaaaaaaaaaggtaggggaagaaaggggggagacctaaagaaaagaacagtcaaactaaaatttgacagtttcttcctgaccccaaaaaaataaatcagatctgttcaactgtgggttctaatcagaaagtgaaaattcaacatgcagcattttagccccacaatgagaaaaatgtgatgccttctcttttttttttttttcctctgcttttgttttcttgtttacttttgatcaaatcatggtaaaacccattcactgtcctggtcctagacttagatattatctggccagttatgagctgtactcactagtgccaagagagaaaataaacagtttgaaagcaccgtgtgaagtaatatgaaacagcctgaaattgtatctggcagcccgctttccacaaagaatatccatacacctttaactagtcacacttacttaaggggtcacaccccaccttccgctactggcatttctgaatctcagagtagtcttgattcaaggagaacgtgtgttattcttttacacgagactgatcatttcttggctagtgtaattcagtcttttgaataaatggaaaaaataaattgtatgttatttttatacagaaaaaaaggccttaatatcataaggtttttttatagccctcaaaactgatttttaaatggaggtaggcaactgagaaaataagcatttaaattagttttcaccccaaagccccccaaaattttgcttacaaaattagggtactcctcattctcaaagaattgggggtgaatatacagaaaaagactataatcaagagtgaaatgccaaattttacactcagttataaactaatcgaaggagcattttcacagcagactcccttatagctgtaaaaacagaatgagggaaagatctatatggagtgacatggaatcgtgtttgatatatgattaatcttcttttctaataagagaaattacaaaagagtatatctatgccatgatcctgttttcaagaagataaacagcatgtgcttagaataaaatatatccactaaactattcaaggtggttatgggaaacaaatgatagggaactttcactttctataatgtctgaactcaacaatgctacagtattacttttgcaatctagattttaaaaaatatgtccttttttaacacattcgccagattattaaaaaccttgggtgttctctatctgaaaagtgaaaggtaaaattgagcttctgagatgaaaactcttatgtgctagaagggtttcacttaaatgacagtaggaggttttacataggatacgggagagccagaggacaggaagcatgtgtggtgtgcgcgtgcatgagtatgtctgcctgtgtgtgcaagcacaagccttcagaggaaagagggagggttactgaaaaaaagagtagctaaaaggaagaagcagagagtagggtgaggtgactcagactggaggcaaggcttttgtaaacagccacaataagtacctccgatggtcccttggtaactgctagagagaacctaggaaaaagaggtgtataaaattccatccttttcagtggtggtgagaggtgccaggtgctattctgcagagaagtgtcaaccaaaaacctgtaaaaaagagccaagtaggccacaagtggtggctcatgcctgtaaccccaacactttgggatgccaaggcaggaataccacttaagaccaggagtttgagaccagcccgggcaacacagggagatcccatctctaaaaaaataaaataaaaaattagcagggtgtggtggcacacgtcctgctggcactccagaggccgaggtgggaggattgcttgaccctgggaagtcaaggctgcagtgagccatgacagtgccactgtcatccagcctgggcaacagagcaagaccgtgtcttgaaaaaaaaaggcaaaattgtctagggatgaaccgtggaagctgaagccactctgtagaaaaccatgcatgtccctggccgggtgcagtggctcatgcctgtaatcccagcactttgggaggccgaggcaggcagaacacctaaggtcaggagttcaagaccagcctggccaacatgatgaaaccccatctctactaaaaatacaaaaaattaactgcgcatggtggcgggtgcctgtaatcccagctactcgggaagctgatgcaggagaattgcttgagcctgggagacagaggttgcagtgggccaagatagggccactgcactctagcctgggtgagacagtgagattctgtctcaaaaaaaaaaaaaaaaaaaaaaaaaaaaaaagcatgtgcctgatagatgacaccacagaattatatccttgtgaatcctgtatacacaggtttatactaagggatcagagtccaggaaagctgttttgtaccacaggtggttggctgagcatggcatgctggtgcctcattcatttgcagacagttagcaaggaggctctggtcccaagggcacagtctgtcccttccttcaatggggcagctgaaacaccaaagaagtcaaggaggggacatcttctattaggaagttgctagagagttccgctacaattctcttcaatgagttcactatctctcagcctgctccccaaaaggagacagtttcaaagaacataaactgcacccggccaagaaccgaggcctatcttagacaatacgatgcagctcaagttccataaagcaggcttgtagggatattacagttatgaccaggaacctacttgtagctaaagtgacaatcaaaggcatgagttatttcaaaggtgcaaatcatcatccgattttggtaaatctctaatttcactcctactatttcgaacctcaaggagggtaaaatatatagagatatggatatataccttctaaacttactttttctattcaacagtctctgtgttattacaaaaaaataaataagtcggccgggcgcggtggctcacgcctgtaatcccagcactttgggaggccgaggcgggcggatcacgaggtcaggagattgagaccatcctggctaacacagtgaaactccgtctctactaaaaataaaaagaaaaaaaaattagccgggcatggtggcgggcacctgtagtcccagctactcgggagactgaagcaggagaatgatgtgaacctgggaagcggagcttgcaatgagccaagatcgcaccattgcactccagcctgggcgacagagcgagactccatctcacaaaaataaataaataaataaatctaactctccctctctctctctatatatatatgtatcttctaaacttactttttctattcaacattctctgtgttattacaaaaaaattaagtaaatctaacaattcagatccaaaagtttttctgcactaaaaggccaccatgaccaaaagccactcattcaacaagtatttcttggagacccactataaactcagcactgggttaagtgctgggaaacagattaaaaacaaatatacaccatccctgttctcatgaacctaattgttattcaaggttataactaacacaagacttaatctgagcccaagtcgagtataaagtgtgaaatatccaaataactgtcattaaaatatatttggaggaaaataatgcagagaaaacatttatcaggcacatttttccaccatgaaaggaaatgctatatactttgatcacaatatttttttgtctgtcaccctaggtctgtatttgaaaaggagatatagaaaactaaaagtccagaatataccatatcttaccttctatttgggatctagaatttctagactaaagaggaggctacaaaaagttaatcaaatatgatatttactaagcacctatcaagcaacctaccaccttggaggtggactctgggatacagaggagaatgaatcagctttacccctgaaagtacagaaacctagacagttaaaaaccaaataattataatgcaaggtagaatgagttaaggtcccaaatgggattcaagggctacagccactgacttactgcccctgtctaaattccagaattttccaaggccctgaaagacataaggaggacgatccaagcctgaatgcctggacccctaaaattatacagggcaagagaataccgggactagggggactttcgaaagtccctccgcacgtgttggaaatcaactcttagattaccatctcacctgccggtgtggacagaaaaacgtgtaatacaagcacctgatgatgaggctggtgataaccagggaatgccctaggctgaagggcaggccaaatcactgctgatttattctctgctatctgaaaaatcactaggccatttgtaaaacccccaagggggactaaaatgacaggcttcaaatgacagttcttacaccatgtcctgaataggagcaaactgagaaagctcccaggccacaccatgcctgggagttccaaaagtgagtatcttatactttcacagacatgtcccaaaaatccaattaattcatctcatctaattaaaggagttcattggaaatgcaatatggtatttttatcgtgctgctgcttgaatctccaagtcagtgaactagaagaaagaaatttttattttgtggagaagatacaagaaaactttgggaaaagaaaggagaggatacactccccccaccccccaaaaaagccctttataaaacagccccttgatgcttggcagaaaacaatatacaccacatgctccagaaaaattcccagcaaaaaaaaaaaaaaaaaaaaaagatttgaaatttgaatacatgttccacatacaaatacaggcctataatcatcattgtgcataacatacataccctgcttcctgtcttgagccaagcactatcaaatttgggatcagacattccatctcactttacttatacttagtgaaccatttgccagagtctctttttgaacagtggatgttagagaaccctctgtataattctgtaatgtataagaagaatttaatcctgttctaacatgctttttttggatatggtgaagtttcaaggaacacagatgacccaatgacagcaaagcctgctacaatgtggaactggataggaatcagatcacatctggatttggtggccaacacggtatcacagaaaggctcttacaatgtgtttattcataattgcagctttgtctcctgagaaaaagaatgaaaacttaagttccaatatgtctgaatgctcccagatcttcaaatcacaggctagaatttcttctctaagttttaccttggccctgttataagtttatcctcaaggataggcatacactgtttaaacttaacatgcagaaacggtgcagaggtctgggtcctgctgctactgataatgccatcctcaagaagaagccatcagttgttagcagcccttcaaattgttgaaagtagaaagtcattcactgttatcgcgcttcctgatttgctaagtgcccctgcacggtggaatcacttgcttggctacctggattgctagaaaagaaaaatagttttcccttctctatctcgcacaggtttatctctgaaagctatctcaggtgaccgacccccagcacatttgctacccgttttaatgttttttcaagaggcaggaacaagacctctgtgactgctcagcttcacagaactagtgggaaacataatacttttgtaataggagaacgaatttttttaaagacacaaagtcatattaatgatttgtactctcggttgaacaacatctgggaaataaaaatctactgtattttggcaacagttccaacaggtggttggaattctgggcacttgccaaaccaccaggagcttctatatgactggcaagctaatgtacaatattgcacactacaattataatgagctgtaaacaggtcaaatgaaagaaatgaaattaaaaccatgataaacacatacaaacggtaagcctgaagttacaggcatcaaatgtagtttaatggaacagacagaataataatgacagtaacaatagtttcttattgagtgtttactatgttccatgcactattctaagcatattacatgtattattactcatttaatccctgtaacagcaaccctatgaagttgaaattgttatctccattttacaagtgaagaacggaaacagggaagctgaccaaggtctcgtagctagtgacagagtcaccatctgaattcaaaccagaacccttatgtgtaacctctaagcaatcctcagctggaagtcaagagacgtgtgttccatttcggattcggtcacaactacatgaccttgggcaaattgctcaacctccctggatctctactttttgtctacgctacacaagagttaaactagattttaggatcacttccacaatcttattgctcttctctccagacaaaactgtctgatatcaaatatttggagtcagttgaacaccatgccctcctccctgagcaaacatacaacacacatgcagacatacatgtgcatgtacagatgtgacagcttcaatcagaggtctctgtgtaggaaaatcagatgaggaaaactgaggcccaaagaggttcaaacctcaccaacactccctatattctcacttcatatttttcatccaagggggctcatttcttagcttattttcatagaaacctaagatttgttttgacatctaatccttttgccctctgttatccctgcttgagttactccttagatatagctaagtctaaactaagtgcaggaaaacactactccaccttttaaccgtactaagcattgaggtacttaaattttaacttatcataaaatactgttcttttttaaaaacatgtaactctataatctaaatacaaaaaatattatacatttccactctgaatcaataaaagactgactgccctgcattgacaggtttgcaacattgcacttgcatacttaaaaatgcagttatcataaaaagtgttgcttaaaggtagctttttcaatgcaggtgtgaattttaaagacacatgtagcatataagaaatggtgttttcaagaaaaatttactctctgtcagtaaagcaaaagcatctcagtattagattccctctgattgaattttcagattgcttcagatatacagacctaggaataattttggaaaatggccttcctaatcttttgtaaaaacatcataaaacataatttctacttaatcaagtgtcatatgattgtcaccaaatctgaatcaatttttaagacccactaagaagtcaagtcattgcaatacaggacaccctctattttacctatgcaccttgagtacttctatgcaatatcccacaggattctacaaactaaacaaacaagccacgattttaaatggaggaaatggaggccagcggaaggaacaattgtacaccttccctttgcttttccccgctttgccttttaattaaatgataaatctcaatatgaattcattagcagcctgatagctcaattaagccctgtgttactgcattctctggggcaatgcttcaatatcagttagcagagtttgaacgtaacctgagcaaaaaatgtgagccaaaagttttattctatcaatcttttgggagaaaaactacaattaaagggggggaagtttcaatatctacagactgttaaatgataaaaagatcataatgttttttcctgtaccaataaattatttggatttgtgttatgcagcaaaaccctttggttcattttaatttggcttcagtgatacttatatcaaacacaatagtaaaaatagaaaaagaaagaaaagaggccaggtgcactggttcacgcctgtaatcccagcactttgggacgctgaggcaggcggatcacgaggtcgggagatcgagaccatgctggccaacatggtgaaaccccatctgtactaaaaatacaaaaattagctggatgtggtggtactcaggaggctgaggcaggagaatcacttgaaccagggagtggaaggttacagtgagccgagatcacgccactgcggcctggcgacagagcaagactccgtcaagaaaggaaggaaggaaggaaggaaggaggaaggaaggaaggaaggaaggaaggaaggaaggaaggaaggaaggaaggaagggagggagggagggagggaaggagggaaggagggagggaaggaaaggaaggaagaaaggataccttggggaaaaaaaggttcattgggagaaacttcccatttgaacatgacaagaaactctgggtgaaccagcaaatgaacacaatgaacttggagtaggaacaggaatgcctgagctacaaaccaaagacagtaacatttagagactccatactttgaatataccatatcaacagtagtaacattcccttcggttaaataaatgtaaatttttttcatttatgcaacaaacactgagtgcttcctgtgagtcagtcgggcatggtgctgaggctctgaaggtataatggtacgagagctcaatgtcattttcccaaggaggcctttctttccctccatatttaaagctgcaaaattcttcctcatccccactcctactttgcatccaaacgacctggtgagctttttaaaaacctggaacttcggccggctgggtgcagcggctcacgcctgtaatcccagcattctgggaggccaaagcaggcagatcacttgaggtcaggagttcaagatcagcctggccaacatgtcaaaacctcatctttactaaaaatacaaaaaattagccgggcatggtggtacatatctgtaattccagctactcgggaggctgaggcaggagaattgcttgaacctgggaggtaggggttgcagtgagcccagatcgccccactgcactccagcctgggcaacagagcaagactccttctcaaaaaaataaaaataaatgaataaaaataaataaaatctggaacttcatccctaattggcctggactggggcctggctttttcagaagctccccaggagagtctactgtacagttaaggttgagacccactgccttaacccacttccatacgttgctttacttcacagcatccagcaccttctaatatatgacaaaatgtgtatgccatgatcctcagcctccagccactaggctatgagcatctagaaggcaggtacgtgcaccttcttattcactgttgaatccccagtgcctgcacaccgtaggcactcaataagtatctgttgagtaaatcaatgaaaaaccaacatgaatcctcccctcaggttctgtgcaatctactggagagagacaaacaaacagctaactgaatggaaaaccacagctgggtgttaaatgttctatatgagcacataccaggagaatttggccttgtctgaggcatcaaggaagtgactctggaagaagtcagatgcagctgggtgctggctttccagaaagtggaaaggaggtgtgtggggaaagcggggagaaggaggaggagtgtggctctgccctggggctggggatgagaaggcaggcagagcttgcctgccttagtaacatgtgaattaactatgagacacccccaaggcccattcaagcagggtggtgatcatattttctatcagtggcactgtggatgatttctaccaatccgtcaggacactgaaatgtgtgcaggaagtgtgcctgctacacgtccaagctaggcccccgctaggagtgtgaaatgcccaacatacctgccaggacaaccataggacaagagacgagatgtcccttgttccctcctgggcccctcccttctccaaaccctaacatccatatgccacgccttaggcaggcagggccagccctagccctaggctagctactctctttacctgagcccacagcccaagtcattctagatactagtccatcaagaatagctaacacagtggccaggtgcagtggctcgctcatacctgtaatcccagcactttgggaggccgaggcggacagatcacgaggtcaggagatcaagaccgtcctggctaacatggtgaaaccccgtctctactaaaaaatacaaaaaaaattagtcgggcatggtggcgggtgcctgtagtcccagctacttgggaggctgaggcaggagaatggcatgaacccgggaggcggagcgtgcagtgagccgagttcgcaccactgcaccccagcctggacaatagagcaagactctgtctcaaaaaaaaaaaaaaaaagaatagctagcactacaggcctacaccacaggatcagaaaacttaccatttcacctaggtttaaactgatatgcatcttgaaaacccagaaatcagagttagcaacaagtagcagaaatcaaatgctaaccgaaaggagaccctgtctctctggagccttggcggaaattgctaaagttggtagacaagttttcaaatggagatcttactcttaagaccatcagtatattttattaatcatacggttttcaaaaaagttataaaacacattacttctttttctacattcttaaacaaaggacagtgaacacaaatgatgtttcagagccaatactgtaccatgttatagttcatcaaatatccacagaagctgtgcttggtgacaggcagggcagtaggtgttggacttggaagcacattcattcctgaggagggtgtagaacacattcttgggcattgggccagctgttcttcaattgccatggttctttacttcttctgggcattacattttataatttcctggcccacttccttatatttgggttaccagctgtcctttcttcccagtactatctgcaagaatccctctttcatttttaaatgtactgcttctaatctactgcaggctgagaaaccagattacctaacaggttagaattgtctaacgtaagattaaataaattctaggttagaaatccaagtgatactctagaaatcaatcatactattgtttgtgagtgtgtggtctttatgacatcagttccagctgttcaaaagcagtacggtgctgtggttaaggacacaggttcaaaagtcagagggcctcagttcatctgctatgtgtatgctcttaggcaaaccacttttaaagactgtctgcttcagtttcttcatctgtaaaatggagataaaatgggtatcttcctgctaggtggacataaagattaaagaagatacttctcattaccctgcacataggatgtgcttagatatgagttgctgttgctgttatcctcacataggatgccctcagatatgagttgctgttgctgttatcctcatcatcaactggggtcaaatatgtgcatgccaacaggatatggcttcaacagcgcctgccacagccaacttcccctaaccacagtcctctgttgcaggaagcaactttgggctgttttcacaagaggatgaccaccaagtaaatcaagagtggcaacatgacagggcagtcgtttcactgaccaggtcaccaccatacccaagacgtggcctaatatgaatggctctccccagcaagcaatgcttactggaaaagtcaatccgactggtctcctccaggccctggacgagagaattcaggaaagactggccagtggttggaagacacacacagggccagagatgctagccaagcaagacatgaaggcatagagcaggaacaaaggagcctggcccaggtattgtggtgggtcctgagaacttacgagagcagtttcagttcagtttctgccccatgtcccctcacaataaatcccaaaacttaaggtagcccaaatgattttcggctctttgcaacataagggcctgctgaaccggccgagggaggcttcccagtagctgagctccactcacacacggtgtccctccaaatgttaccctcaactggcgaggacttaaaagtcaattggaggcggggtgcggaggctcacacctgtaatcccagcactttgggaggccgaggcaggtggatcacgaggtcaggagatcgagaccatcctggctaacacggtgaaaccctgtctattcaaaatacaaaaattagctgggcatggtggcatgcacctgtagtcccagctactcaggaggctgaggcagcagaatcgcttgaacccaggaggcagaggttgcagtgagctgagatcgcgccactgcactccagcctggcgacagagcgagactccatctcaaaaagaaaaaaaaaaaagtcaactggaaaagagatcacctgcattaatagagcagtcaacctgggaacctgaaggccatggagtcaaggaagtatctgactgccccagggatccccctcaactgcttccacccctaccccacacacatgcaagccccagcttgaagacccctgtaggtctttacagaaacaatggctggacttccagggcacctaccacaatttcctgaggacttaagtatcaaagtagagataagttattgctgtggcttagttaggaagagctaagtttcgaaactaaatgaacctctgttgttgattaggaaatagcaggaagatgagtttaataataccaccaccctgtagaacacattaatgtttacaaggtacagtctcacatactccacctcatttgaccttcttaacgaccctatgagaccagtattatgatccccatttccagatgtggaaactgaggctgagaagttaaaaacctagtccaggaactttgggggatcagctactgttatggtgcagggccacaggctctcccttttaaagggcttcacagaagacaaaagggtacacaaaaagaggctgtgtatcctcacaaatttctccttttctgtccatttttaaatcacttagaatagtgcctcctttacacttaaaatcccaggccttacttagatgcccagaggtcaaagcgacctgtccaaatttacctcctatggtccatggagtcaacaaccaaagagaaaacagaaacaaatccttgataaactgcatacaattagctagaagagtaacatctacctaggtaaggcctgcagattctgaaatcccaggcaaggttatatgcacagtgcttggagtgaagtctagggatgtctgctcagtaagagaccagggaggattttggctggagaaaaacaaaacttcaaagagaacagagcagtggagcttcaaaggccccctggcaggaccaattaacacctacaaatgtttatctaggcagtcatttaatgatggctacttcactaaatgggtgttcaccttaaaaacagctatagcccagaatgggattggagtggggagttagggaggacaggacaggaagttctatattgtgttttgagagagagaccctagtcaagaagaaaacactcaacaaggtgaaacccattacagactatttctaatgaggaaaaaaaaaaaaaacaagttaaatatgtaagaaggctgggtgctgtagctcacgcctgtaatcccagtactttgggaggctaaggtgggtagatcacctcagatcaggaattcaagacccgcctggccaatacagcaaaaccccatctctactaaaaatacaaaaattagccgggtgtggtggtgggtgcctgtaatcccatctactcgggaggctgaagcagcagaatcccttgaacccaggaagcgaaggttgcagtgagccgagatcgcgccactgcactccagcctgggtgacagagcaagactctgtctcaaaataataataaacaaataaaatatatgtaagaaaatgtaaatggttaaacaaactctggtccaaccatgggttagaaaaaaaaaaaaaatcacaccttaaaaatcctattttccaaacaatttactagaacagaaaaatgcccttggataatgttaggaaaaaaaataacatccaaaaatacatttaaagtctgacttcaactttacaaaactgacagactagaatggtaaggtgaatgggtaggagtttgttttgtttgctgaagtagccccagctccaatacataagtgtctggcacaaacaagacacttaagaaaaatgtgttgaattcattatttactcaccattaattaaataataattaacctatctatccagggtacttggatatgcagagacagagccacataaacatataggtatatatatgtgctagaatagactgactacatcaaagtttaccaatagtggctaacacttataatagaattaggaaagaaatttaattatgtattccaatcttctgtattttcccaatcttccacagaggctatgcatacttttttttttcttgctttctttctttctttgaaagacaaggtcggccgggcttggtggctcatgcctgtaatctcagcactttgggaggccgaggtgggcggatcaccgaaggtcgggagttcgagaccagcctgaccacatggagaaaccccgtctctactaaaaatacaaaattagccgagtgtggtggcacatgcctgtaatcccagctactcgggaggctgaggcaggagaatcgcttgaatccgggaggaggaggttgcggtaagccgagatcgccctattgcactccagcctgggcaacaagagggaaactctgtctcaaaaaaaaagaaagataaggtcttgctctattgtccagggtggagtgcagtggtgccatcatcagtcactgcagcctcaatgtcccagactcaagcaatcctcccacctcagtctcccaagtagctgggactacaggtgtgcaccaccatgcccagctaatttttttatctttagtaaagataagatctcactgtgttacccaggctagtatgatctagaactcctgggctcaagcaatcctcccgccttagccttccaaagtgctgggattacaggcatgagccactgtgctcagcctgtgtataacgcttataattttttaagcactgtttttcttttaaagagccttaggtcctggaggcattgggtgtggtatgttccagaaacagaatattcccataggcctttcatttctattctattggatcacagtgtctacctggggcagcagtcactctgatccccatccacctgcagcgacatctccagggttcactttcacttacaatcacagagggacaccctgcaggatgctatcagtaggggaaaggtcacacagacagaatgctaatcagcttcctcacttttcttagaagaaccctaggagagaattacaagcagaatctacatagaaacaattccaatgccccttgaacagaagagttgaaggagttcagtgcttaaatgtcaggtttaggagccacctttatgacatctctgagccaaactttttcctcgggaaacatgttcataaagtaaagcaatggaaaaaagatccatatacaaacacctgactcacgcttcacgtattaaaagttaatatgtaacagggagaaactctgtttgattctttaagatggtaacattttgtagaagagaatggactttggaatctaagtacccaggtaggaaccctgccattttctcactagatgtgacactgagcttgttactttactgtctcaggggcctacattctaatctgtaaaatggggatataacctaactcacactgttgttgaaaggttctatgaactaataaaagtaaattcaaataacaggtactcagcaaatcttctagtctggagggaatcctgtttattacaggagcctggtcaaggtggaagaggttttaaataaaaacaattataggttgaatatctgttatctgaaatgaatgctagttatcccttatctaaagaaagttaattccgcacaacctgaagcatgtacatgttccatgcagggggctggcacacctgttctgatgacatggccactgcatacaacattcacattatgacctcgagagaaaaaaaacgcactattttcttcttccagagtatgaaggaagcgctaggtaattattacatggcaatagctacttctcaaacaccttgttcagaaaataccttgtttcaaatacacaatttaggctgagaaggacttggcctaaaatgcttgaaatgcttgagaccaaaagtgtttcaaattttggatttttttagattttgagatatctgcattgtatacttagagttggacatccctaattcaaaaatccgaaatccaaaatgctcatgtcagtggtcaaaagtttcagattttggagcattttggacctttggattagggaagctcaacctgtagttattaacctcatggaaacataagcttctgtgttcatgtttgaacatgaaacatgtccagaagcctgcagaagccaatgaccactttgtctcacctggttcattctgaatatgcagtgctgcaaagcgaatgcagtgaggtagcaatgaatgttcttctctccgtgaaaagaacagacaactcgggccataaaacctgggttttagcctcaattcagccacttacaggctgcgtagcctcaggcaagtcaccttaccaccgtttgcctccgtttacacaccagcaacatagcctgagaagacaccttcaagatggttgtgagcaaagcagccaggccctaccaagcacaacttctgctgtgacattggcatattaaaggtcattattggcaggagtttctagcactgtgttctgagaaggcagatcctcaagccttctgacagaaagaactaacaccacctgcaggtgtagcatctccccttttgccatccaaagttgctgtcagagtcagggtgaccaaaggtggcctccaatgggcaggacctgcccaaaccttagtaacaagccattattcgtagagtaaaatcctgcaggcccctagcttagatcacagactccactggaaaccctcatttgctaggctgaattcagtaataatacaaatgtccctgaaagtagcaaataacaccccaacatttactcagggattccttgtgattgaggttctcaggtgctctccagaaagcaggtttagaaagaggcgagaaaggaaggagagaatcagaatctcggtgtcagaagacaaacttgccaacttcataattttccatagggctggccctaccttattttttaactgtgctaattgggtttatgttagaaatgcttttgtgctattgtacaactgtggggagaaaggtgctaatattttacatttaaaacccgagaatctcaattcccacctttcattttggagaaggaaaacattcatctaaggttcactgctggatcatgaacttgctcaaggtgtctgttaatacagtttgggataatgaggaaaaaaagaaaaaagtatttagcatttttacttgccttgcacatattttctttttgctgtaagtgcatgtaattcaacttattgttcagtcaatgcacagtctattccctaaaccccttagggccaaattgaaaggttcaaaaaactcctacttagactaaacagctccacagacctacccaactaaacaaacaggcaaaatgtaaactcccagagcaagagtttgtaagtctgaggatgccctcagcgggaggtgtgtgtcagcccctgaaaccatataacaaattgtgtacatgcttttatttatttacttatcatttatttttgcaaaggttgtcctccaagttttcatcagattactgaagaattctaagagaaatcccataacaaacaccattaataaggatctccttgtggctggtgaattttcaagggtgcctgagaatagaaatgaaagactgcagatcaaggcaaaattaagggggcctgcattctggtgctacccttgtcactaaacaattttcttgccttaagcaaacccctgaaacgttctgtccctcagtttctacatctgtaaaaatcaggatgttggaagctgaatgatcacttacctccaagacccttgaagataccaggatggtgaggtacagtgttagcaaacacagaaaaagggaaataccaaaaagaattgcacacaatcttgcctgtttccagaaaagctttaaatattcacccttgctttccttggagggggtcaaagatagaagccacctctcctttccctctctttcttctatttcaaatagctgaatctaaagtttcacaataatgccctttgtagggatgtgaactatgaagttcatgcaaaagtacaataattctataaggatgcataagtagctgaaagaacataaaatacaaagaatttctctaaagcgtcactacaactcatctaattactgcaatgacttgttttagctggcattatccacatgtgttaaaatatataactgataaaaaataattacagctatcataaaaattgatattttaatataatcctgaacgtctgggtcaaaaaatgacaaaagaaatttattttctctctattacaagagaaaagtattttctttcattccttgcagcttttctatacctttgtaatcaacgtctaattttcacaaaggcacaggtgagacagaagtcattgctcttttagcactaaattctttatcgacacataatattctatttcaccaaaagcaacctttttttagttgaaacatttgtatatactctatatttgtatatactctaacttgaccataataccataaattttcaatctagtcatcaggctgcataaagtttgctccaaaggaaacttacaggtgattgcttgagggagcaaattaaactgaagctttttttttcccatggacacttgctaataagctagatggaaactgattgtgtttttacaagctattaccaaatgagtgcttagagcacccctgaagcagtctgaaacccactctgcaaaacccaaactaatgctcaaggtgactaatcaaaagtcacaccatgagtcagtatgagaagtcaaacttacacagatcacgtctacagacctaacttcaatatcgcctccacccaaaacgctagagagactggcatatcttgacttgaggagttctgcatctcacatatctaaggccatcttccagaaagcatcaatataagtagcacagtagttgctcttacgccagagcacgacacacgttgcttgctctgctagcgtatctccaaatttgagagttcttgcttcatcttcatgtgttccaaaaaaccaataataaatggcaataaagtttgtaagcaccatttctcaaagacaaataattctgctaacccactcagaggaatgagtcaaaactccaggtgtaccaggcgagtgaatgtaaacctttcgcagcaccatcccgggctacatgcaagtttagggctggaaggtatgccaaaggggaacataatgaaaatccagaagtgtccctgctaaagagatccctgcttgggagaaagagcaaacttgcttttctacgaaatgccacttttctgatcagacccaatcctgaggtcctgaccccttgtggtctttaaacataaaccaaagtgtgggtgtcatatttcttggcccgatcacaaagaggtcaaaaattagttaaatttagtaaaaattaaagttttaaagaaaccaacccctcccttcattgctgatctctagaaaatgcttccattccacagaaaacgtagaaacgtaatatttattttgggaataaaagggtaagaaagatattattcacttggattaagggtattttccaatatatataattcaaatttcctaagctgaaatctcagctttagcccttttagaaggatgaagaacagaatccttccacagaattctttgagactgctttagaagacactgaaaggttagacttcatctcgagttactccaccataaaccagacaaagaaattcctgaaaggctataagcatttttttcttacaagcacccacaggaataggtcaatgtaaatgtcgtataaacaaagcagttcattactaaccatagtttaaatgtcttttatgagaaaactgtaatccattgcaactgcacattcatacataactgcccctggatgagaggaaaatatggattcataattgatcttagtctccggcttttcttatgcctgaaaagcaaaaggtattgggggttggaaagctgaatctgagtgcttgatactttctccttcactctctatgatcaagtcttggaggactttaatttcccttccaatcactcctatagaggccctagtgtctgaaaaaatgcacagacgacaatcaaacctttcatttcaaggccagtttcccaccataccccttcctgttccaatcaggtttgcgaaacatttcccctattctgcatttcatgaatcaattgcaaaatctgccaacctctgccagttcctcttgtactcagctgagaggttccccttccttccctgggtagcacaaggctgctctggtttttaactggcgtaacgtggaaatgcactgtaggaactcactaactctttcacagccagatgtaagtgagagtctgggcggcaaccccacctactaggaaactggtccaccaagctcaggataaagcagatttgtggaatttagctttgactccaaatcccgtgtcagttactgtcacggggaaggaaaaaggaagagtgaaaaggtctacaaagtaaccaattcagttacttagcaactggacaaaacttgcctcactacagagggtaaggaggcatctcacacccattcaaagagtaacagtctacaatttacatgcaaatagataaagaaaaaagggaacgggaaatctaaattagcaactggagtttagacagtgagactgaggcccacatttaaaaaaaaaaaaaaagtttatcctaggaaagagacaggacatgtacagaaatgaatgaattaataaatgaatgaatgaatgaatgcatgcatgcatgcatgcatgcaaagccacaggcccaacaagtttacagtctcccttcataaaagtcaatgccacgggggagagaggaaagggccacacaaagttcgatacaatttaaacatttccacggctaacatgaattacaggcttacagaaaatgtgaagttgggaaaactcctgggaaagtaggtacccccgctcatgagaaaagcaaacaaaagcatcactcttggtggaaggtctctggactttgggtagatcacagcctctccgggtctctagataccctcagaaacaccctccagtacccatgcctgaaatgcagttactaaacttggatctaaccccgactcttaacaggagacacgccgccctgcaggtttcctaagcaagagggagatactgtcacctacttggctcgagaaggtgctccaggcttttcagtttgcccgaggagctccaactctctgtccccagcctctagctgcacacccgaaccggatttgctcagttccaggctcaaaggggaaagaggactgagggctcatccgccctcaccccatcccccaacttcacacctggaccaaggccggcagagcccaaggctgactcccaaagacacgccagcccagacacttacttctcatactcggtgttgtctctgtcacagcgagaatccttgtgcttttgccagtctttgccatgcttgcaggtggtgaggagcacaacgtcctccccgttatggacgtgatataaggcattcctggtgtctgatcctatccctgtcaggtacctcttccccttgaataccagcatgtacttcctgagaggagggatggtgttgaacttcaaaaaccccctctcccctcctgtcctgggatgatccttagaaaagaggggaatagaaacatcaaagttgggtcggaagttttcagtactgatgctggctttggccagcatcgcctggccgatgtcaaaccccacgtcctcggtgtagtcaggccaagtgccggaatataaattaaaaattaaatgattcctaccattgttccacaagtggagactctgcactttggatctcaaattgtgcacatactgaggtgacaactggtctctgtctaaagtatccagactcaggacaaagaggcacgcctggctggggtccgaggtgtagaacctggagccctcgatggccgctagaatgttttggtaactttcggcgattttctcccctttttgctgtgggtatacgtagactttgaagccgtttttcttgcaaagggtgaaatcgaagcaggactccatgcggcacttcttgcctttgtagatgctggagttggcatctcgcttctgccggggggaaatgtgcacgctggaatcctcgttttccaattgatcccaaggaacgaaggggcgcagagcgtccgggaagcggggccagaaatgatccggactggggtggtgcaagccattcctaccgctgtgttcttctctccggctgtggctcctcgatgccctaaactgcaagcctccgaaataaaacaaaagggcgagacaagagccagctgagagcaggatgaaatagcgttttttggcctgcatgtgtcctgcctgggtcaagaggattgtaaataaacacaagaatcacccaagtttcccaatcaacactttcagctccagtccgccatcttcccgcctgtaaagacttcaaactctccgctcccaccttctctggatgcctttccccaagccgtggactgatccagcgcatgtgggcgatttctttaactttctccccttcggtctttcatctttgggttgcacaatgcacgggagagagcggggctgaatatctcgcacccagggcgggcgagcagcggactgtaattttcttgcatgcaacaagacggaggaaaagaaagagagaggggagaaaaaaaaagctcccgatacccaatcaatggcaagacgaagtgattgccttgcctctcggattcctctcggcagcgtggaaaatgagccccgggaaggcaacttcaactcatccaccactctccgtgcagagcactccggttccaacaagtcagccgatcccgggttcagccggctagtgcatcttgcagctggggcgccgtaacctcacaaatccctgcatctctctttattcccttctgcagcggctccaagactccggcggtgtttactcctgcgctcgcggggccggcccccgggacgcgcggcggcccggctggaggcggcggcggcggcggcgctgggtggcggcggcggcgcgtcctccccgcgggcagtgccggccccgagcagcgcttcgcaggcccccgcgcgaacgctgccgaccgccgcgttcggtcgccgaatgttacccggttctgaatgttacacttacacattccattcccgacacgacagcgctgacctcatccatccacgcagcccgcgctgccattggccgagcgtcacgtccggggggggcggtgcttccgctgcgcccattcataacccccggccgcgggccgaggcgccggcgcggcgttgggggcgtagggggcgcagggagccggggctcccgggttgcaagctgccggcgggctgccgggcaggtggagcgcgggacggcccggtgcgagccccgcggcccctcggcgcgcccaggcccggatctcggcctgcgccgtgccggggaccagaggcgcctgcggaaacgcggcggccggggaaggaggcaccggcaggggccccgtgccgcgcggccccgggcgccctggagaatctggcctcctgggctgcctgccggaacgcctagagaaagatgctttgaaggagggaagcagggaggaaaggaagacttcatagaaagcgaccgccgatccgaaagctgcctctcccagccctccttccactctccgagacccagtatttcaattttctgctaagcattaaaacaatctccccttactcctcctctacatagcacatttttttaaaccaaagaaacaccccaatgcccaacaataaagaggaattattacaatcaagaggaattgttgcaattcttcatgcctgcctctgtgctaagagtgtaagacggctatcctaaatcctcattatctacttaggccgccttgcctgagccccctctgtctattatgaagaaagcttccaagagatccaatcacagagaaaaaataaattttctaatggctgcagggaaaccagttaatttaagcttgccccagtcctcaaagtgatgttattctcttggtggtggtggtggtggtggtggtgttaaagatatctcttaaggacatatgactggtagaattgccaactgtcccagctatagaaggaacacttgcatcaggaaaactaccttatgtacaattagtgccaaatagttggtccttccctcactgacctcccactccttggcccaagctcctgccactcccagtggaagaacttcattagataactcaggtaaccgaggagcagtcccgctaaagatcctccaggtccacaaagatgtgctaggctcccaaacagtatctctggtcaaagtcaaactccctggcctcagatcctgaacactgctttacagaaaacacctcccaccctctggcctagctaaagtctcagggctcgggcaagctagacagttgcctagggcagccggctgtttagtgattgtttattatgggagtgactgagagctaggagcagacacttcccggcttccctcaggctgcaaaaaccccagcggggtgtggatgaagggcagggttataacaaggcagtatgaaatgatagagtggaaagtttcagacctctgttgtttcagatttgttttaataaag

SEQ ID NO: 192 - DNA, 172904 bp, Homo sapiens
  source 1..172904: mol_type = genomic DNA
cccaagactgattgtaaagcacgtgttcttctagtgtagtaatcagggtggtgggccctggagtcagaccactgggcttgagtgtggactttgcctcttaccagcaagtgacttaattcctttaaatcttagtttttgtttctttgcctgtacaatgggaataataataataatgatagtagtagccgcatcataggattattatgaagagtaagtaaaaattttctaaataacatttatagaaggtaaatgctcaaaaaatatgagcaacaataatggtgccaatagttgttgttgtagtaataatgtttattagtataattagctagatctccatggagggtgttacttttgataatccctgaagtctcctgattaggtggggtggggtgtcctctgcaatgcatgtgggtactggggaggggaaggtgggtgctaaggagtggagacagatacacccacaccccatcatgggaaattagggaagagtgatggcagctgcctgaggattcaccagaggagcttcaggatgcaccgtgggttggggaccatctggcaagcactgtctttttgtcttatcttcagcctccgggaggaagtggccaagttcctgtctttctactgcaagagcccagtacccctcagaccagagaatgtgagtggccccctccactgctccttcctgttctcctgcctcccctctccatctctttctttctttctttctttctttctttctttctttctttttctctctctctctctttctctccttccttccttctcttttttttttttttattttttttattttttcagactgactcttgctctgtcacccagactggaatgtaatggtgccatcttggctcactgcatcctctgcctcttgtgtttaagtgattctcttgcctcagcctcccgagtaggtgggattacaggcatgcaccacacgcccggctaatttttgtatttttagtagagatggggttttaccatgttggtcaggctggtctcgaactaccgacctcaggtgatctgcccgccttgacctcccaaagtgctgggattacaggcctgagccactgagcctggcctccattccccatctttgggctggcctgagagtaagctggggttgagatctgcccttcacatagttttgacttgtttcagagtagaattaggaataccttctccctcctcgatgtttaaagtttgggtataatttccaccccatgttgttctgtgggccttctgcctccacaccttcaggcgagaccctctaaatgaccagccccctcttcctggctcagatgatctggagcagggtccacacggatgagcttggctgtcagtctagtggctttgttgtgacagagcctcaggtggcaccaaggcagggcctggcgctcactctgtgctgtcctgggaggctgcgggtccgtgcacactcctggaactggttcatcttcatcccttggatatgtcgcccttaggtggttgtcctgaatggtggtgcctcgctcttctctgctctggccacggtgctgtgtgaggccgggggtaagtgagctctgtggcctgccccgcactgtgagcctcattgtgcttgcagggttcccagttgcctggcctcaagggctgcaatagtatgctttcgggcacaatagaatatactagactgcagggggcttgaataagtggcttgacaaagcacccgggggtcagcagttccaggggaggttagtttgatgtcagggtcctgggctttctctctgccatgaccttggctgcttcatgctcataaggtggctgtcgcgtcctcacgtgacagtgtgtcttagagcaggaagaaagggatgtggtcgtgccgtgcctgtctcttttttatcaggagatggggatggggatgctgtttcccagaagaggcccacttctatcttcctgaccagaatggactcatatgcctgtttccaaaatggtccctggcaaaggggactaagaaaaccaaggttgccttaaaccagatgtggtttgtcccccagggacaggggaaggcccaccttccttagacatcttgctggtcatacctgaagaaactagtgctctcttagcatggaaggaaattggaatggctgttgagtgggcagccagccagcattgcctgctgcaagagcctgttgttttaagaatcagttgtggtcaggggttattggttgcaaggaaaagagacccattcatggtaacttaattaataatgagaatattagtaacatttattgaccacgtactgtgttccagggattagcctaaggctttatgcagagtatttcatttaatcctcacaatacttcaataaggtcggttctatggttatctctattttacatatgaggagactaagacacaggaggttaacttgtcaaagtcacacaaagagaggtagtaaccagtatttgaaccatgaaagagagattcattgtaaggatataatagggaatttcctgccggttccagaacaatcaataacaggaaccctctaagcttcagtttccctgtctataaagttaggatataataaatagtacctccttcggagactaattgtcaggagcaaatgagataaaatagaaacaaatgttcagtgcatttcccatcacgtcgtaaatgcttagcaaatgttagctgttaataattagaaagggggctgtattagtctgttctcatgtgctaataaagacatacctgagactgggtaatttataaaggaaagaggtttaatggattcacagttccacatggctggggaggcctcacagtcatggtggaaggtgaatgaggagcaaagtcacatcttatatggcagcaggccagagaggttgtgtaggggaactcccctctgtaaaaccatcagatctcgtgagacttaattccctatcaccagaacagcacaggaaagacctgcccccgttactcaattacttccctccagatccctcctatgacgcaggggaattatgggagctataattcaagatgagatttgggtggggacacagccaaaccatatcaggggctgatctcagtggatccaagctttccaaagtgttttgggagttaagagtgcaagtatgccccaaacggtccccaaagaagttaaaggcttggagagggactggggacagtggacagagggtctggggtgttctggccagaaagtgacaggccctcgcccactcctgcccccagaggctttcctgatccccaccccttactatggcgctatcacacagcacgtgtgtctctatggcaacatccggctggcctatgtctacctggacagtgaggtaagagtcttgacttcctaggtggaacctgggcctgcctgtggtcaagagtttcctgggtctgaatttgagggtggtccatgctgagggctctggggttgtgatgagtagggaatggagccttctgttgctgcatggctgcctgtgcctgggttccccagtggctccaaagttccagtctctgagatccctggggttgatgtagaagccaagagccagacccagaaacagcaaggtaggaacagagcagggtagacctaagcatgacacccaagagtgatgagggggtctctgaagtgatgggttgggggtggatggcagtaagagggagggaccccacctgcttttccagagactcttctgaggaggctggggattacaggggaggagaggcctgagagttcatatgtattttggggggcaatggtcactgaatgtggctggtggctctgatgggtctttttccaggtcactgggctagacacacgccccttccagctcacagtggagaagctggagatggccctgagagaagctcactctgaggtctggggatcaaatcaaacctgaggctgggtgtgggtgggtctgagcagggtctggacccctcttcttgtgactgatctcctcccgggagtagggttgatacccggtgattgggacagacaggtagggtggtagcacagaattattctgggagtcaggcagaaccctgcccagggagggtcttccctttcaaaacagactctcagacctcagttcacagagaatcaaccagggagcatcactaaagatacccccatccctgatccatctgattatgattcagtgggtcaagtatggagtacaggagtctgtggttttacaagtctccctggtagtttgagggggcaaccttgctcactgtggggggagctgaggactcccaaaggagagcagagaccagtattccagtggttcctttccagcctacttttcaaaaatctacttaatttttttttacttctgtcatgaaagctatacatactcactgtaggaattttgaaagtgcaaaaggccaacccaaaattctaccaacaaaggtaacctactggtatttgggtatattttttctctgggccttgtcctccgcctttatctgatgctgcagatgtaattctgtgttccgcttgtttgcttcatgttgtgttatgaacatgtccccctcaaatctccctgggagccttccagcgatcagccccctttgactgtgtggctctggccttggggaagagctgagggtctcctgccctaacggatggtttcagggtgtgaaggtcaaaggcctcatcctcatcagcccccagaaccctctgggtgatgtatactcccctgaagagctacaggagtacctggtatttgccaagaggtgaggcaccccacactggccccgacagagcgtctgggcagcctggggttccaatgcgggtttggtgcaggtttttctactctcttgaccccactgtgggctgctacttgcttgggcccttccttggcagtggagcggggaagcagggatttgtgggatgcccattcctctttatctttcactctttataacaatagctatcaattagcgcacactctaggggccaggcaccatgctaagcactttatgtgcctcatacaatcctcacaacaatgctatcatacaatcctcacaacaaccctttatgtgcctcatacaatcctcacaacaaccctcatacaatccttacaacaatccttacaacaatcctcacaacaaccctactgatgctgttatcacatccagctcactgagccttagagtggtcaagtgaggggtggatccagacttgaacctgggtctctccgactcgagcccttgtgcatgaccttgcccctccatggaggtgcccgggagatccttttctcccctgcagtgcttcaaaagctcctctgtcacctgctctgtatgtgtggctttctgtttgaaaaaaacagaagaaagaatggtgttcttggaaaaacaagtttggtaaccccgggctagaccccggcccctctggatttctgatgtattacctccccaccctgtgggacgcatctgccctacacactaagtctctcctccccacccctgcctcactccaggcacaggctgcatgtgattgtggatgaggtctacatgctgtccgtgtttgagaagtctgttgggtaccgcagtgtcctaagcctggaaaggtgaggctccctgacacagctaactcccccagtccctattatcccacggagccctggccactttctggctcagcccacagggcatggcctgcccagagcaattccatttccacccagctggtcccactggtcctcagatctaatgagaagcagggacggttgggctagattagtgattttcaagttgttctgtggaatttctgagaactccaagaagaggcctcaggatcccttaagttagggctgagtggatggcaaattggcctctttgctgtttcctttacctccagagtcgctccagttttattcattcattcatttactcattcatgctctcattcactcagcacctctggagccccttacacacagagtgtgccaaacacctctggatatttaaatgttgggctttttcattaggtttactgtaagcaaagcatttgtggccaaaatacctttgggaacacttggagcagatcatcctcaaggcacactggcccatgcctgtaatcccagcactttgggaggccaaggtgggaggattgcatgagcccaggagtttgagaccatcctgggcaacatagtgagactctgtttctacgggaaagaaaaagaaagtggggaccagatcatgtgggtagtctgtgaatctcaccttcaggggttctaacagttccggctgtttgttcagaaccttcagcccagccaagccctttccattagccttctcttcttgtcctcacaaagccttgaggagttgatggagcatggattgtgactctcatctattttttggattaggaaactgaggcacagaaaaaagtgattgtccacgatccttggttagtcattaaaaaaaaaattattgagcatcgatttcgtggcaggcactgtgctaagtgctggagatacaacagtgaacaagaaagacatagacccttcttgtgtagaactttaatttctagccagaaaaaccattttagcggctaaatgcacatccagccattggattatggccatcatgaatgctaaaagggagagtccagggagctgtgagaggatctgtttagggtacctgattggcctggtcccagggggagtggttagggaaagtctctttgatgagtgacatttgagctaggctctagatcatggctgtgttctcattaaactttatttacaagaaacaggcagcaggctatgtttggcccgcgggctgtcatttgctaacccctgctctaaaggatgcatgggaatgggtggttcaaagacatgaaaccagggcttgtcctggaaccaaaactagattcaaccacccatctcttcatttgttcaaccaaacacatgtgggtttccatagttctgtgttgcctctgttcccatgctgtgctctctgcaggctccctgacccccagaggacccatgtgatgtgggcaaccagcaaggtgagttcctggctggccttgggggtgtcagaagggtgggagggcagagaggtgggtggaaccagcttcctccatggagggctggccaccgcctagggtgcttcttcctgcaggacttcgggatgtctgggctccgctttggcacgctgtacacagaaaaccaggatgtggccactgccgtggcttccctctgccgctaccacggcctcagtggcttggtccagtaccagatggcacagctgctccgggaccgtggtgactgcctgggcctggtgacctgaaaatgggaggagggttggaggcagcctgggaacagccaggaatcatagatacttctcctatgagaataatttagggtaatgtttgagagtgccagctctgagccccgactgggtccataccctatttggccacttcctggccatgtggcactttgcttcacctctttatctgtatgagcctcagtttcctcatctgtaaaacagggatcataatggtacctgtcctgtaacaggttagtatgatttgtaattcaattagaatagtgcctggcatataataggcacttgattaatgtgaattcattatgactagctgtgtgagcacctaaaaaacagagcagggtcgagcatggaggttcatgcctgtaatttcagcactttgggaggctgaggtgggaggatcacttgaacctgtgaggttgaggctacagtgagccttcatcataccactacactccagctcgggtgacagagtaagaccttgtctttaacaacaacaaaaaacagcagaagcttctaaggaaaattgttttaaaggaagtatctctcttgctgtgaatctattctgttcctagattcaaatagtgagtttaaatagcaaaggttacctttaaatgccgccatttactgagcctagcaaatgcacctgctgtatcatctcattcactccagaatcctaggaagcaagaattcttatattttccttattattttacagatgaggaaaatgaggaccagatactaccccactcactatagtagctaaaagttttaaaaatagtgacaacatcaagtgttgacaaagataaggagcagctggaagtctcatacactgctggtaggagtgtaagtagttcagccactttggaaaagaattcagcagtttcttataaagttaaacatacacttgccaagtgattcaacaatcctactcctagatattgaccttgatggtcacccaaaaacctctgctttattcatcatcacccataactgctgctttattcataatcacccataactggaacaacccaaatgtccttccacagatgtgtggatgcacaaaccatggcccatccactcaatggaacactactctgcaataaaatccgtggcagtatgggataatttcaaaggaatcctgctgagtgaaagcagctagcctcaaaagattacatgctgtataattccaattcgatgacattctggaaaaggcaaaactgtagtgatggagaacagatctgtgcttgcagatctgtttatagtcacatcagagatgtgactatcaacagcatcagggtgttctttaggatggtggaactgttcagcatcctgactatggtggtggttacataaatgtacacatgtattagaattcatagaactgtatgacaacgacaaaaagtcagtacaaacaatgaggatcagagaggtgaagttgcccaaggacccaccccttgtcattggccacactgggatctgaaccttggtctgtgggactacagagcatcactctggaactttagaactagataaacattgggttcgattctttatcctgggggactttgcgctgagggggtgtgggacctggagctgtcagggctgagtgtctgggtttaaggtgctttacattgaacactgcatttccatcccttcttgacctccccttcgtaatccttcccaccacagcagccagctagaggagggactcaacagcatcctggcagcttgtggcctttttctttacagcatttagactagtgggaccaagtagagggttgatgggatattgatcttctggcctctttcacccaaacagactggatcaaccaggtgtacctgccggaaaaccatgcccggctcaaggctgcccacacctatgtctcagaagagcttagggcattggggatccccttcttgagtcgtggggctggcttcttcatctgggttgacttgagaaaggtaatgctggtggaggtgcgggctgagagggagtttcaggtctccctccagcaggtgaggggcagttggtgaggggtctcagctatgtcctgagccccttccaccctctcagtacctgcccaagggcacctttgaggaggaaatgctgctctggcgccgctttttggacaacaaggtgctgctgtcctttggcaaggccttcgagtgtaaagagcctggttggtttcgctttgtcttctcagaccaggtccaccggctttgcctgggtgagcagcctgcctttccagcccagtcctaactgcagccttcactgtggcctccgcttgtttgtccccacccacgtggccatcagtgccaactggcccctcacttccccttcccagggatgcagagggtccagcaggtgcttgcaggcaaatcccaagtggcagaagacccccgtccctctcagagccaggagccaagtgaccaacgcaggtgagctggtcattgtctcgtggccagagggcccagcagccactgtggacctggggcgttctggggctgcagaagactgactgtggatgtgccatttgccaggaaggtatctaacttggctttgtgcctgaagaactgtttcttgtctttcgctgtagcagtgggaaactccttaagctgtggttcagcctgggccctccctctctcctattaaacaaaactaggagagtccatatgtctccattgtgagttatttagaatggaggagtcgtgactgcttctaaccagagcctcagcccccctgaggatgtgaaaagaaaacaaacaacttgtaccttctttctgatatcaccgtcattcctctttctttgtcaccaaggaaacgagtcaaaggaacagcacatacaggagagtttgtagaaaaataaaaaaaagtgataacttccaaactccgaggagaatggaatgaatgttgtttgtacacattgttctccccacacttaagacagttgggctcaacagcacactgagattgtgggaccgtcttctgattgggacaaggtgaacaggactctatggtggaagtcaggagaggcatctttatgggagctgaactggtccctcaatctccaggaagctccttctccctctccctttgaaagagctgccttcactgatgtccccaaagcagagtgacctagtgatggttgttgggggaagatttggggctggaaccctgaactgaggctgctatgaggccaagctaaccaaggctggcttttctattgtaaggatgcagatgagggccgcctaccccattttcaggggtgcgttaattcagaggctaaatgagcttctagatctgaccaggtgtgtcagatctaaagctgtgtgctgaggagccttcccaggtgctgacactcctgcttggaagccgatgctttccttctttctctgtttttttttgagatggagtctcactttgtcgcgcaggctggagcagtggcgcaatctcggctcactgcaacctccacctcctgggttcaagtgattctcctgcctctgcctcccgagtagctgggattacaggtgcccgccaccatgcccagctgatttttgtatttttagtagagatgggattttgccatgttggccaggctggtctcgaactcctgacctcaggtgatccgcccgccttggcctcctgaagtgttggaattacaggcgtgagccaccacacctggcccaagacttctttctgagatcacttttcttttgcctggagtgtagcacttcagtgtcctttggtgagggtctgctgatgataaaccctcagtttctgcttgtctgtattttgctgtatttattttattttattttaatttatttgagacagagtctcactctgttgctcaggctggagtgcaatggtgtgatctttgttcactgcaacctccgcctcgcatgttcaagtgattctcgtgcctcagcctcccaagtagctggaattacaggcatgcgccaccacacctagctaatttgcatttttagtagagacagggtttcaccatgttggccaggctggtctcaaactcctgacctcaagtgatccacctgacttggcctcccaaagtgctgggattatgggcatgagctacctcacctggcctgctctatttttgaaagaatttcactgggtgtaggattacaggttaatagttattttctgacttccattgtccctgtcaagtagtcagctgtcagtctgtggcttcttcaaaggtgatctgtttcctctgtctcaatgcctttaagacatactctgatcattgatgttatacagtgttactattatatatctcgatggtttctttttactgatcttattttgggtattgggattcttgcatctgtggattctttcagcagctctggaaagttctcatcaaatatttcttctgcctcattctccctcttctctccctctggaattcctattaaatgtatgatatagatcaacttgctctgtcttcatgtctcctaatctctttttcatattttctttctcatctttctgtgctacattcagggtaatttgttttggtctatttttcagtttaataattctttctttagctggatgtaatctgctttaatctatttgagttttaaatttaagcaaatatatttttattagtagaagttctaaaagttattctttatacctcaagtttgtttttcattttttaagatgtaataagcataataataataataagtttattttttgagacagagtctcactctgttgcccaggctggaatggtgaagtgcagtggcatgatctcagctcagtacaacctctgtctcccaggttcaagcgattctcctgcctcagcctctaaagtaggtaggattacaggtgtgcaccaccacacctggctaatttttggcatttttagtagagatgaggttttgccatgttggccaggctggtctcaaactcctggccttaagtggtccacttgcctcagactccgaaagtgctgggattacaggcgggaaccacgatacccggccaattatttttatatacctctatgcatctttctatgtatgtattattgtatgtatctatttccagtattccagtgtctgaaatctttgctggtttgtttctgctattctgtctcatgccttgattctttgtgagtttagtgattttttatggtgagctgtacatttttgggggaaatttatttgttggaattctttgaagtcttagataaagacagattcctcaagagagtttttgtgtgtttatttcttccaggcaactagaggcaatgccagtcttcaaactaaatatttagatttttttgttgttgttgttgccatcagctgctgtgaatttggcctggaaatctagtctggcaagagccagcttttggttacaacttctcaggttaacttccctcctttaacaccaaggtttgagacagctttccttgcagtcttctgaagagggaggaaaggatgtgaatctggtttagccttattttgtggagttagctttttggagtcctggctttattggagaagaatttcctattagatttctcatctctggtcagcctccaggagattgggaaaatagaagctcgagatcattgttttggcaaatgcctcaagatgaaagccagcatcatagttgtcactcagtcccatgcctgatcattcctttgttttgttccagctaatgcatgtgctcatgaaaattgtgttttgttttgttttgttttttgagatggagttttgctcttgctgttcaggctggagtgcaatggtgtaatcctggcttactgcaacctccgtctcctgggttcaagtgagtctccatcctcagcctcccaagtagctgggactacaggtgcccgccaccacatccggctaatttttttttttttcagacagagtctctctctgtcgcccaggctggagtgctgtggcgggatcttggctcactgcaagctccacctcccaggttcatgccattctcctgcctcagccccccgagtagctgggactacaggctcctgccaccacacctggctaatattttgtatttttttttagtagagatggggtttcaccatgttagccatgatggtcttgatctcctgacctcatgatccactattttttttatttttttatttttagtagagacagggtttcaccatgttggccaggctggtcatgaactgctgacctcagatgatccccttgcctcggcttaccaaagtgctgggagtacaggctgagccatcacgcctggcctgaacattgtgtttcagcattgttacttgttttcagtgtatgtggtggggagagggggtctttcttactgtaaatgactatgtgggctttccttttgcactctcatttaatcctgacttcatcacaaggcagatattgctgtcctggttatgtttttaagtagaatttccatggtgtatagcttttcactattatgaataatgctgctgtgaacattcttgaatatgactttttgggacacatacatacacatttcctttcactatgtacctgctagataatggggtaagctcagctttagtaaatactgccagtttcctaatatgattctaccgatgtatagaagtgtataaaaattctattagctcctcatccttgccaacttttaggtattatcaggtaaaaaaggtatgtagaagtatctcattgtaggctgggcatggtggctcatgtctgtaatcccagcactttgggaggctgtggtgagtggatcacctgaggtcaggagctcgagaccagcctggccaacatggtgaaaccccatctctattaaaattacaaaaattagctgggtgtggtggcaggcacctgtaatcccagctactcaggaggctgaggcaggagaatcacttgaacccaggaggcggaggttgcagtgaaccgggattgcgccactgcattccagcctgggtgacagagcaagtctctgtctaaaaaaaaaaaaaagaaaagaaaaaggaagcatctcattgtagtctacattttcttctgttctggtacaaaaaccatgtaacatttaccattttaaccatttttaagtgtacgcttcagtaatgttaagtacgttcccattgtggttaaacagatctccaggagtttttcgtcctgcaaaactgaatctctacaccagttaaaccactcttcctgcacgcttcctctcagctcttggtaaccactattctaccttttgtttctatgaatatgactaaacctcctgtaagtggagtcacacaatattggtccttctgtgaatagcttatttcacttcacataatgtccttatggctcattcatatcatagcatttgataggctatctttccttgttaaggctgaataatattccattatatgtctataccatattttgtttatcattcacctatccatggtcattacgttgctatctccttttggcttttgtgaatagtgctgctgacagagcaggagcatcgccatcttggacaagcacagtcattttaacgttcacattgatcaaaaactgcccaaatccaaaatgtgtctctctaatggctaagatcagcatgaccataaactacaaattgcatttctgaccagaaacattccaaacccctccctttctagagacatgccagccccgagataacctcctctccagcaggagagatgtcagccccaaggtcacctcccctctgaccagagacattccaaccccgccataaacttctcccttacacagaaacattccaagcctgtcataagctgtctctccctgaacccttaaataatcttagtctgtgagagaacatgctcctgaccgaaatcagccagaagcccctctcaggtttattcttcaaaataaacctgtctttgactattgagccacttttcatgtttctttcctctttctttaactcatatactgctatgaacatgggtgtgtagctatctcttgaagaccctgctttcaatgcttttgggtatatatccagaactggaatcgtcgggtcatatggtcattctattcttaattctttaaggaaccatcatactgttttccattgcagttgcactattttacagtcctgccaacagtgcacaggggttccagtttctccatgttctcactagcacatgtttctgtttgttgttgttgttgttgttgttgttgttttaagatggggtcttgctctgttgcccaggctggagtgcagtggcatgatcttggctcaccgcaacctctgcatcccaggctcaagagattctccagcctcagcctcccaagtagctgggattacaggcacgcatcaccatacctggctaatttttgtattttagtagagatgaggtttcaccatgttggctaggctagtcttgaactgttgacctcaagtgatttgcccacctcagcctcccaaactgctggaattacctcactggccttatatttttttttgatagctatcctaatagatatgagacagtatctcattgtggttttgatttgcatttctctgatagttagtgatgtttagcatcttttcatacttgttggccatttgcatatcctcattggaggtatctctattccatgtggtttgcatttcctgctgctaatgatattgaacaggttttcatgtgtgtgttgcccttttatgtgtattcttttgtgtggtgtttaagaattttgttcatttaaaaaattgtctttttctaattgaagtgtaggagttctttatatagcctggaaatgagtcctttgtcagatgcctttaaattatcaacattcatagttaacaaagtctaaattttaccttctttatcctctacctgaacatgaaatgacctcagaacattgagctcttactcctttactttggtctcatttgatattgttgactggtgtattagctacacctagtttgttttttttttttgaaatggagtcttgccctgttgcccaggctggagtgtaatggtgcgatcttggctcactgcaacttccacttccagggttcaagctattttcctgcctcagcctcctgagtagctgggattacaggcgtgcgccaccatgcctggctaatttttgtatttttagtagagacagggtttcaccatgttggctaggctggtctcaaactcctgacctcaagtgatccacctgcctcagctgcccaaagtgctgggattacataggcatgagccaccatgcccggccctagtttttaaatttctaaattatttttctagttttatacagtcagtgtttgttttgatttacccacaggtttatcagtttcattgtttcccagccctacttcattgcagtacttccttttggttttaatgttttccttcctaacattcttaagaagttcctttaggaaggatctactgatggtaatctctttctatttgtatttgtctaagatatctttacttccctgttattcttcaaagatggtgttattgggcatacaattatacatcattaactattgccctctcagcctttttactatgattttttggctttaggtttttgttgttgagaagtctgctattagtctcattgttagttcattgcaggtgatcatctctgctcaattttggaaaattcttagctatcatctccttggatattaccttcacctccttttctctattccctccttttagatatgtgccattttcttcatctctcctctccctctcttaacttctctttcctatatttaattcgtttcctgtctttcagatcgatcgttgttgtttctaacctactatttaacttatgcattgacttttcaatttcaatgtttatatttagtacattttcagtctccttggtcttttaaaaatataacatcttatttctttgtaatgttttacatttcattttaagtctttgagtggtataaacatacttgttttatatttatgtatcataattcaattatatgtagttcttgggggttaaatttctgctgtttgtgatttctggtggtttgttttctcatatgctttatagttctgcattgtgagtttacatttgtcagggttttatttgtcagaatcctaggtagcttgtgttgaggatgtgggtctccagaggggatttatgtttccttctgttggatgtctttgggtgctaccaacctgggaatactgtatgttactatcctggcttggagcttcctagaccatgctggtggtataaattcaaaccccagatggtcataaagcttgattgctatgaactgaatgttcatcccctcccacacctccttcatatgttgaagtcctaatccccagtgtgatgattattggaggtggggcctttgggatgtaattaggtcttgagggtggaatcctcatgagtaggattagtgccctgacaagaagagacacagaaaggtctttttctccaccatatgagaatatagcaagaaggtaaccctctgcaaaccagaaaaagagccctcatcaggaaccaaattggccagcaccttgatcttggacttcctagcctctagagctgggagaaataaattcctgttgtttaagccacccagtctgtggtatttttgttatagcagcccgaactgactaagatatgcgtgttaaagatcatcagtgagactctcttctttttccattccctggacaagacaggtaagtttctttggtggatgttgagcaaattttttccagtattccctgttgggtgtaattctttaagatcctagctttatgggtttctttgtatcagcttcctgccttgtatgcccaagatagttgtagcttcaatgtcatttctattatttaagcttcatttttgactttggatgttttccttccttttttttgtgcgtaagctcagctattcacttgagaaggtattccttatatttcacctggttaggtgttttttagcctaccatgctgcctgccagtgctgttttaagctgagccaacctaaggtcccacagatcaattatattatggagcccttttctttagagaatatgcctttttccattcttggatatctctgttacagtagactcttgaataatgtgggggttggggtgccaatcccctaagcagttgaaaaatgatgtataacttttgactcccccaaaacttaactactaatagccttctgttgactggacaccttactgataatgtaaatagtctattaaacatattttatatgttatatatattaaatactgtattcttacaataaagtaagcaagagaaaagaaaatgttattaagaaagtcaggaggaagaaaaatatatttactattcattaagtggaagtcataacgatcttcatcctcctcatcttcatgttgtgtaggccaaggaggagaaggaaggggggttggtctcactgtctcaggagtggcagaggcagaataggtagcagaggtggaaagagaagctggagaggcaggcacacttggtgtaacttttgttgaaaaaaaatctgcacagcagtggatctgcaaagtttaaacctgtgttgttcaagaatcaactgtatttagaggaagtgctaaatatgggattcaaccctacaccagctctttctcctaattggaaactcactttcccctgatgacactattttccacgaaagccattccctttctaatcctgactttcatatttcctgactcactgggtaagggggtatctgtgtaatctttgctttgccctgtaacttcaaattcagtaaagcagtatctttctacaacctctcctccttcaaccaccagctactaagacgcttttctgccttctcagaaacttcaggtcctggcttataatttatttcccactcctccctgaagtcatccttggatactttcgcatcatgtagcttctaatttcacatcttctatattttcccacctccctcacttgcatggtttctatgcctagaaatgtagccacactggattgaaaaacacttgctctttctgattgcttttccttctttatttttatttattactctttttttttgcagagatgggggtctcacttttttgcctaggctggtattgaacttgtggtctcaagtgatcctcctgcctcggcctcccaaagtgctggggttacagatgtgagccattctgcccagctgcttttccttctttaacacatgctcatgactttctttctctgccttgaatgcccttttcacctctctgcttgtcaaaatactaagtgtcctccaggataaacaaagatatcaactgttgattgaactcttcctagatttttccaactggatgtcacctcttttttttttttgaattctgtagcattttgtttatatgcttctatgccactttttaccttctcctttgaataatcttattgtcttatttctagttagctcctcccagtgtctaggcatcctttctccattcaacaactatttattgagcaattaactatatgccaggcattaggcaagtttaaggttataaaaaatgaagaagataggcagcattgtgtgaggctgtgcctcacacagttctttaacacggcaaattctcattttataaaagaacaaaggattaattaaaaacatacatgtttaaaatacagataaatatggagaagaaaaaaagaggccacaatcttccagaccagatagctattgttgacttatttcaaaaagtgaaaacaatattccctgggataagataaatttggatacagttccagtggtgattgtcactgctctccacccatccagttctcaaatggggtgggtgtgtgctacattttgtatcatttgcaggggggatttgatttggaaagcagagcaatgcccccttggatgtggggaagcagaacatgagtgtcccatccccagaatgtcctcatcccaatctccctagatctgtgacaagcaggcattaactcacaaaaatatccctggaatcgaggttgctgccggaagcctctgtaggtatctagtctcagaatcatcactttgaatatttaagctatcagtgacaacttccaccagatggcgccaaagtacatctgggaccagaagggatttggatcctgtagccagacccacaactctaccaaaccaacatcgcaggcccaggggtcatttcattaacctctcaataacatcgctctgaattttaatttaattttttagtttccacttactgctttatgacagcggttttagtgtgcatggatagggctaaatcatgtaaataatagagaaagatacaaaacaaaaatgcgttttttttttttttttttggagacagggtcttgctctatcacccaggctggagtgcagtggcacgaccacggcccactgcagccttgacctcctgggctcaagcaatcttcctgcctctgcctcctaagtagttgggactacaagcgtgtgctacgatgcctagttaactttttattttttgtagagatggggtcttgctctgctgcccaggctggtctcaaactcttgggctcaagcgatcctctcgtttaggcctccccaaatgctggaattacaggcgtgagccacctttcctcgccataaatgcttccatttccgcctcgacaactactccacctgaagctgttcatttcttcttgcattccttccagaaaaaagttatacacatgcctgaatataagcacctactttatatatttctccctcttgtttttgcatatgcatagtttacctaaaagtgacttgcccgctgttttggactacgctttgatcttaactaatatcttggagatatttccttacccaaatatattgcactatctcacattactcaaatcaatcaaattccataatttatttcgattgtgtctagcatttcgctatgattagaaagaatgctgtcatggaactttttgacaaacattgttgagaatatccatagggcaaactccgtacagagagcttgttggaatgaagggtaccagcattttccgtttgatggatagtaccaaattgccctccaggaatgttatacgctcaccagaactgattataataaaacgtctacatatttgttagttttataagcaacgcgtggtgtctcgtttgggtttaaggattctttaattatgaatgaggctgtctgagcatttcactgcggagcctgagcgcgcctgcctgggaaaacactgcagcggtgctcggactcctcctgtccagcaggaggcgcggcccggcagctcccgcatgcgcagtgcgctcggtgtcagacggcccggatcccggttaccggcccctcgctcgctgctcgccagcccagactcggccctggcagtggcggctggcgattcggaccgatccgacctgggcggaggtggcccgcgccccgcggcatgagccggtgaccaagctcggggccgagcgggaggcagccgtggccgaggtaagcgcggctctccagggcggcggccgggcgggcgctgaagcgagggctcgggcctccgggggccgctgctgggtcgggacaagggccgagggagcgcggccgcgcggaggctccgtggaggcccgtgggctgcgagaggccacccccagccccgccggggctgtgacaatgactgcccgcttttggagcgctccgatttccactcctgcttctccttctcctccggcggcggccgcgctttcagcatcttggtacccacctgttctcctagccaaccttcgcccccagtccgctccttcctttcctcctgcgacccgccctccgccctccgccgtgacccctcccttcctgctgccaccttcccgccagccacagggatctgattcctcccagggggatgtcctgcgcctcagggtccggtggtggcctgcggcatcccttgcggtgccagaagccgtgggacgaggtagggaaggggccaggggcatgttatgccggggactgggtggtcgggggcgtgttaggccggggactgggtgaccgggaactagatggccgggggcgtgttaggccggggactgggtggccggggtcatgttgggccaggcactaggtggctgggggcgtgttaggcaggggactgggtggccgggggcctgtcaggacggggcaggagtatgttagactgcggactagattgctggtggcatgttaggccagggactaggtggcccgggggtgtgtcgggccggggccaggggcatgttagtctcgggactaggtggccagaagcacactggctctgggcttcaacttgaagtccagaggtgtttggggctttgttacattcggtgggaaccagatctaaacacacaattttgagaatcaaagaattgcttggtgttactgattgggcaatgctaatctagaaaggttcttgacttatttatgtgaagatatggtcttgaaatatgtacatttaaattcttgtaagtcttaacttcttgtaagtcaggtaagtgctctatgtactttaactggacttagtttgtaactttcagaactcaaaggctattcactgtaataaaatagatgattcagtttccatcattcactttccccgacttcctggttgcatgtgagggtatgaatggataatcagttttggggccagactgccatgctgtgaatcctagctttggcatttccagttgtgtaatattgggccaggtacttaaactttctgttgtactatccccatctgtaaaatgagggtaataatagcttggcttatagtgctgttatgaagattaaataagttaacactataaagtgcttaaaacagaccctggcatgtagtaagtgcttagtaagatttacatattaattatgtaatgacacacattgtcttatggtataattcccatgattaaaagggcattgtttttaattgaaaataatttttaggggcatttagccataacataactttaattataaagaatcctatcaagtaaggcaatgaattgtggctttttttgcttttgcttatatttggttcctctgtttttcggaatggttgggttaagatccagtgtggcagtggccccaggagttcagctgtaaggccctttctaaaaaggttaagaagaggccaggcgcggtggctcacgcctgtaatcccaacactttgggaggccgaggtgggtggatcacttgaggccaggagttcaagaccagctggccaacatgatgaaaacttgtctctactaaaaatacaaaaaaattagctgggtgtggtagcacacgcttgtaatcccagctacttgggaggctgaggttgtagtgagttgagattgtgccactgcactccagcctgagtgacagagcaagactccatctcaaaaaataaataaataaataaataaataaataaataaataaaataaaaataaaaaggttgaaacgacaagagactgtgactgaaaacattggactaagtggattggctataacctgaagcaccaaggaaagattattcaggcaaattttaggaataaataattccaggaacagaaaatgcatctcatcctcacaataggttggggttaaaagacttttccagtgactcagtgcttgacagctagccagatgattccagtgttttgcaggggcaggtttgatgtgtttcaaggtgataaagtttgtagggctgaaattcttgttttgatccaggttatggtattgtatggaataaaccttcattagtagaagattcctttcagtctgtcatcttccggggattttaacttcttggtggtagggagcagtctcactggacagagagattatgacttgtttcctcggatgatggtttggagatactccatctctctgtgctttggcatgtgaaaactgttttgggaggattggttctgtgtgttacaggggtgaggttggagtgtcctgagtcgggagcactgtcacttcagtctaggctggcagttttacaaaaggggtccagtatagcacaggtttataaaggcaggggtgcagcctgggcacggtggctcaatcctgtaatctcagcactttgggaggctgaggtaggtggattacctgaggtcaggagttcaagacgagcctggccaacttggcaaaactccgtctctactaaaaaatacaaaaaattagccggggatggtggtgggcgcctgtaatcccagtgacttgggaggctgaggcacgagaatcgcttgaacccaggaggcagaggttgcagtgagccgagatgacaccactgcactccagcctgggcaacagagagagattctgtctcaaaaaaaaaaaaaaaaaagcaggggtggggaaagtaatggtgctctttggatgtgtttgcatatggtgggtggtgggagaggagggtgttcaggggtgggtacagaaaattcagagtctatggaaatatctagccattccccctcctcctttggaaattccttcctatttaggaaagataatagtcagaggccgtcacatataataactcaaaacttggatgctaaaccgtgtgcacctatggaactgggaaggatacagacatttgttcgttcaacaaatatttatgtttatattaaatatgttctattttcttttttctccttggagacagggtctccattgtcgcccagactggagtacagtgacgcagtcatggctcactgcagcctcaacctcccgggttcaagaaaccctcccacctcagcctcccaagtagctgggagtgtagtcgtgcaccaccacacctggctaatttttgggtttttttttgtttgtttgttcgtttttgagacggagtctcgcactttcatccaggctagactgcagtggcgcgatctcggttcactgcaagctccgcctcccaggttcatgccattctcctgcctcagcctcctgagtagctgggactacaggcacccaccaccatgcctggctaattttttgtgtttttagtagagatggggtttcactgtgttagccaggatggtctcgatctcctgatcttgtgattcgcccgcctccacctcccaaagtgctgggattacaggtgtgagccactgtgcctggcttaatttttatattttttagtagagacagggtctcgctatgttgcccaggctggtctcaaactgctgaactcaagtgattcttccgcctcagcctcccaaagtgctgggattacaggtgtgagccactgcgtctggcttaaatatatgctctggatttggtattagatgctaggaatactgagcagagatgaacaactgattacaggaaaaatcacaaccagtagaggagacagacttgcaaatacttaaccaattcataaaatgtggcaagtgctagaatgcagtgtatgaaaggtgatgtgggtgctcacagggaagatcctctctctgtaaagcactgcttagtaaggggcttttcccctttcttttctcattctttccctctcatttcttctattgtttattccacctcaagtgcttgcttttattcctcagagtttgatacagatgtgtgggagttcgcttagcttgtgtcgacacacttcacaagcatggaggagtttacgtgtctgagggcatccctcagccagtgcggggtgggctttggttgttgaatgatgtggcttccctccaaagggacagctctgaagtgtgttctccgtgcttctccagagggatcctagaaggactgggtattgtggcctagctcagtctggtaagcagctcaagtgtgcacccttctgactcctctccttacttccacactctggctttctggattcaccttttgcaagctacttgcacccaagttgttttctcttagtttggcagagcacaaaccaaggtcgttggtactagaagtggctctagaaagcaggctgtgagatagtattgtgaaaatggaatcactcaccctcagttggcaacaaggacctctttgctagtattaattgaggtgttggtaacccctggtactctctaacatcacagttgtagtaagactgtcaccacgagtggtttaggatgagactcaggtggaaggaaaagcattggctagtatggtagctctagcacttgagcagtgtatggacaatggtaatgataaggagagtggagttgactggctcttgttattttccttagaagccttggggtaagagaatgccatgcccagatcagccagacatgaactcagggttcattgtgaaagacagaaggctctatggccgcatctcctgcagctggagggtgggctctgttgaaggtcgggcccagaatttaattatacatgtggcagaattgcaaaggaagctgaatgcacagccttgacaggttgcctctgctaaagtcagggcaatggtagcaagatgtgagaccctgagacctggatggagatatttgggtggaggcaccgagaactttgaattcccagatttcctcagatcccttgggccagtagaggtatgcacctctctgatgcagaggacagcagtttcttcttgcctggacactgtgcagagctctcacttgaggcagatgcctcccatatgattcttgtgctcctcaagatctgccttccactcccctcagatctcagcattgcctgagcaggaaagcagttcttaaggagttgcaggacctggctaatatggaccagcagaaactgaggaaacacagtgggttgggggtggggtggggagaatcttaagggtgttggaccaaaggtgggggtattggtggactataaagctggagaggagagaacctgttgacaggtgagcattctctcatgattcaggatttggtgacctagcaaggacagctggagccagtcttggtatgcggctgggcaggctccttgaagcttggacacaacgacccataccagtggtttgcaaccagggctgattttgcctccccaagggatatttggcaatgtctggatatatttttagttgttacagctggaggttgcttctggcttctactgagtagggatgctattcagccacctccaatgtacagaatagctccccacaaaaaagagttatctggcctaaaatgtcatagtgctaaggttaagtcactttggactgcaataaatgcggtggaggcatcagaactattttggcagagtattgaggaaggaatcacctgcacctcctgcctgttttcctgggagggcctattcctttcactctgctaatgtggaatgcccagtgaggggacctgcatctttgagaagctcagtgttggctgtcttctgtaggacaagattgaccttaggagatgttactgtgaaactaggttcccaagtatcaatgaggatgataggattctgagatagtggaggccagttggtggcagttaatcatcagagacaaggtagacatagtgcccagaatgggcagcaaggctggactcacaactggggaatcttgacccactctgatgcgaatagaacatggtgtttctaagctgggcagctaaccatggtgctgcttgacttgtataatcagtaaaaaaaaaaaaaaaaaaaaattaagagctggcacgtggaagattgatgtcagctgctacaatggagaaaaatcactatctctccccttgtgttcagacatgagccatttcttagacccatatcccatggattgaaggggaggctggatctctttcgggaaagatcttgcaacattcctgcacgtataggcagacattctcccatccttcctcaagggaactgcagatctttatcagaatagctgtacagcaaagaaagtataatatttagacctttatagggctgttgaatatagggttcgggctgataacagtaccaggcaaccctcaaccaatagtggataggtgttgcagacagatgctctagtctcccatcctgcttagagaccagctgtattctaaatgagtcttcagaaggctcctggtagccttaggagcccctgttgcccactgcagtaaccagcctaagaacacactttttattggctttgccctgttgcctgtctccttgctccctcactgtggctttctgagatcacctcccaagtaagtagactacttgcactcctgtctttgtctctgtctctctctttttttttttttttttttttgcacggggtcgggggtatgaggggagtcaaactatgacaggtagcaagcaaaatatgatacttaagactaacatagtgagtgtcagctccctcttccttctgctgaggccacttgggactctggagtcagttcctgtggttccgtatcttctccaacaatacttggtggtgtttgactcttaatttgcctatgctgttgggtataggtctcattgtggtcttactttccatgaccattaaggagactaaacatctttttatatgtttatgtgccttttttgccttttctgtgaaattcctgtttaagtgtgttttctgttttttgtttgttttgttttctttttgtttgtttttttcttattgcttcgtacagtttattctggttgcaagtccctgttgcttatatgtgctggaaatatattcttcaggcttgcagcttgtctttttacttccttattgtgtttttgatggaaaattcttaatggtttctggtttttgtgttttggaaatcattctctgccagatgtcattgatattctctattgtgttctaaatattttatagtttttccttttacatttagttttaagatataccttgaatagatttttctcccctttggctgcttttaatattcttctttaactttctttttagcagtttggctttgatatatctaggtagcattttctttatatatatatatgttctgttctgagttgagcatcttgagtctgtgaattgatgtattttatcatttttggaaaaacttaaaaaaacacagttggattatcccattggcttctacattcagtctgttgcagtgtcatatgtcatgtagcctctggaaaatggaagtgaataaagcaaatgtcagtattaaactagtataagccctttgaaagggcctgggatgcctgaagcatacttcaagaaccagtgttctaagattttggtatgaagcatttgctagcctcctaaactgagctttgaagtgtttcctcttttttttctgaactctggaataatttgtggaaaattggaattattatttcttgaatatttggtagaacttggaaaattttctgggcctggaattttctttataggaagatttttaaacttttgattcagtgtctttaatgttatagagctactcagagttgctgtttctccttgagatgcttttggtaagtatattttaaaataatttttccatgttatctgagttttcaaatgtactggcataaattcattgataccatcttatcttttaaatatatgcagcatttagagttatgttccccttttcaggtatttatttgcacctttttccttgaattcttgattaatcttaccagaattttattagtctgtttttaaacaaacaacttttagccttgttgaccatttctattttgttttttaattaatctctgtgcttttatttattattttcttctgttatctttggttttactttgttgtgatatgtcttttttatagttaatctgcaactcataaagatttgtgaagctcatgtgtgaatacagtttttgttcccttaacctcaattttgtcatacatagaagctatttttcaagctatggaggacccattattgggtggtataattgatctagtaggttatggccagaattttttaaaaagcaatagaataacagagtagaaaaatggagggttcattgcgtgttctgtggctaacactgtgtactcacagtacatagcttaaatgttgttttttgaagctttatttaaaatatccatatacacacatatatatatctgtctatattgggtcacaatataacatatatttcttactgtcaattttagtttaaaaaaagttttgaaaaacactattaaagggtagtttgtctaatattaataaaggtttaaaaccagatggcacaaaatacttgaggagcttgtttttaaatgacatattctgtggccctattttaaacttactgataacagcctccagtggtggggccaaggaatctgttttaacaaactcttgtgcttcttacccttcaggtgttggggaaccactgattcaagtatacacatagaccttgagagcttcttgggaagttctaacatgggccagcggagggcagctccttgcctgcatttgtcccaaaacttcctgtcttcaaactccaggagggatatgcagaatggcaaggaagccataccatagggtgggcctgcagctggtaggggatgggagcaggcaggaatattctgcttactgttagaatgatagaaaaagtgaaatcgctgtcatgccacatttctgtcatagaacaattagaatatattgagtgactgatgtatatactccaaagatgataatcttttaagctcaaaatgtatgaattttcatgtattagtcaatgataggcaaattccttgttatgttccagtttctggtcttagagagatatgacttgaaatgattcatgaccatttagcatattttacccccaaaactgaaagtgattgcaacattcaagcttggcaatactcagctcgctaggcaggaagcagtttaccatgtgggcactgatggggagagctccatttatccgaagcaaaaatggttgataactctaagatggtctatgagcttttcagttacttcccattatattaatagctttcctggaagatccgtgagtagaatgataccattttgtttatttatttttattttattttattttttgagaaagagtcgtgctctattgcccaggctggagtgcagtggcacaatcttggttcactgcacctccgcctcccaggtttaagtgactgtcttgcctcagcctcccaagtagctgggattacaggtgtctgccatcatgcctggctaatttttgtatttttagtagagacagggtttcaccatgttggctaggctggtcttgaactcctgatctcaggtgatctgtctgccttggcctcccaaagtgctgggattataggcatgagccactgtgcccagctgtctttttgtggattggtattttgacatgcaggatgccaaaatagcttgttgcagtaacatggtaagtatgtggcagatgatgcagccacactcaaggctctgccctcccccgaaacagtatccgggaatcatataggagaggcttgtttggtaaggatcttaaaatgtggtctacatgggaactctacatttttagctgaggactacaaattttctttacatctcagtcaataatgcttattggctgttttatatatctatagctgtataacaaaccaccccaaaacttagaagctttaaacaacaacagtcatttatttgctgatgattgtggaatctatgcagagcttggtggggatggctcatctcttccctaatggttttgactgagatctccgtgtccactggggcaggttgccttccactgggagctcagcttccttagagcatggcggctggattcgaagagtgcaaaggcagactctatagggcctctcaagtcttgtgctcaaaaatcccaaaacatcacttcagccacattttcttggtcaaagcaaatcataaagctagcctagattcatggggaagggacatggattctacattttgtttggagaagtaccatgcaaattcagggatggaaagaactgttggtgttcgtctttgtaaatgaatctaccacattggcccttttcctccctttctcccttctctctctttctcttccttttcctccctccctttgtctctcctaccccattcctttcttcatttcttccatttatctaaatgcaactatcaccttcattataaatcatcactatatgttttatttgaagatgaaagattaattttttttcttattgatatccttttgtacttaatcgatactttcctagtggtgtttttacattctgccttttgttatagctttgttttctctccctcattagagtagggtctttgctttcatctttgttttcttcacagtacatgatgggtgctcaataatggtttgaatgaataagtgaacgaaaacagatttttttttttatgacacagagtcttgctctgtcacttgggctggagtgcagtggcacgatctcggctcaccgcaacctccacctcctggattcaagcaattctcctgcctcagcctcccaactagctgggattacaggtgcatgccaccacacctggctaatttttgtatttttagtagagacgggttttgccatgttggccatgctggtcttgaattcctgacctcaggtgatccacccatcttggcctcccaaggtgctgggattatagacgtgagccaccgcacatggctgaaaacagattttggaatgatgaagcttcagtttgtccagttaaatcattattttatgttaagcaagtgttttgaaataaaataactgtcttttgctattccacttttgatttttctgccttggtcagagccctccttcccagagtcccacatttgccagcttctgctttaagtaaatgtatattgatagggtatagtaatattttatattatgaattaatatttatgttaaatatatgcagtattaaatattaaatacattatatactatttattcatatatctagatatatatttctaaatgtttataagaagtgtccaaagtccctttttgttatttcaccacaccacttaagggaaagaaataggtacattaaaagtagaggctgggcgcggtggcttatgcctatgatcctagcattttgggaggccgaggcaggctgatagattgagctcaggagttcaagaccagcctgggcaacatggcaagactccttctctactaaaaatgcaaaaaattagctgggcgtggtggtcacagttacttgggaggccaaagtgggaggattgcttgagcctggggaggtgaaggttgcagtgagctgagattgcaccactgcactccagcctgagtgacagagtgaaaccctgtctcaaaacaaaacaaaacaaaaaaaaaggttgaatagtcttttcaagtgtcatttgccatcctaaatacttggtttttcttatttctctccctggtgaccaggagtgtgaggaagaggctgtctgtgtcattatgtgtgcgtcggtcaagtataatatccggggtcctgccctcatcccaagaatgaagaccaagcaccgaatctactatatcaccctcttctccattgtcctcctgggcctcattgccactggcatgtttcagttttggccccattctatcgagtcctcaaatgactggaatgtagagaagcgcagcatccgtgatgtgccggttgttaggctgccagccgacagtcccatcccagagcggggggatctcagttgcagaatgcacacgtgttttgatgtctatcgctgtggcttcaacccaaagaacaaaatcaaggtgtatatctatgctctgaaaaagtacgtggatgactttggcgtctctgtcagcaacaccatctcccgggagtataatgaactgctcatggccatctcagacagtgactactacactgatgacatcaaccgggcctgtctgtttgttccctccatcgatgtgcttaaccagaacacactgcgcatcaaggagacagcacaagcgatggcccagctctctaggtatctcacactcatacagcccagcccccaggagatacttgagtggccctcagggaactaaagggaagggaaggatgggaatgcttctgctcttgagttggtttcccgatgctgtcttcttgcaggacggggtgtgttggagggactgacttgcagcatgaggcctgtgtggcagcatctgcctgtgtgcccgtgaagagtagtctgccatctccggcactactgctgtgggttcccagcctcttagagtttccaaactaagcgtggctcttcttcatttattcttccttttaaatctaaatatgctaccacctcctcgtagcacttacataatacacattcactgtaagaaatctgaaaatacaggtaagcaaaaagaagaatctaagattcattctgaaatccttcctctaagagataaacattattaatattttgatgttactaaaaatacacatacacatctgtatataaatgttttgttccaaatgggatcacacagtacatactcttttgctttttcccttaatatatcatgaatatatttccaaattatgacataattttatgttcttttactatataactttaagggttgcatagtattccattttgcagatgttctaccatatatttaaccaggcttctctaatgtattttgtgtttctttaaccaaatggtgaacatttgggtagttttcaacttttcattattagaagcaggtctgtatgggacaagcttgaagtacacgtgcgttcatttttccctgtcatggagccagacttgtgtctgatgtgctgttgggatttccaggagtttgctttgcatacctgagaagcggccctatttgggcttggggatccttgatagttgttgtctagtaactgactcttgtcttttcatagttgacacattaattctcctacattttaaatttcttgacaggtgggatcgaggtacgaatcacctgttgttcaacatgttgcctggaggtcccccagattataacacagccctggatgtccccagagacaggtaggaggcatatttggggctgtccttatgatgggttcaagatcattttgttcatgtgaaattatattcctaaatctaccacatactttgtaatcagaattgtttattaaactagaaaattgtcataagtattttcctcctgaagatttagaagtgcttaaatcttttatggaaaaccagttagggcttatgtcctggcatagcctctaaaactgttttcccactctggattgtgcacttctgagtgtaacacatccagcccccaaaagtgtgacaggcttgtgctagctctctctgaattcgggagcatttgccacaagtagatgcacagcttactgagagaaggtagcgtggatatgtaaaagcgatacccaaagcctataatgtagagggtaatgggggcacgctgattctcatttactttctgttgtttcaatcagtagggttctttctgtccgttcctccctccctccctgcctgcctgccttcattattcgcccctcttgcctttcgttccttccagaaaaaccttccaaataggcagatgtggtatggggtggccatgactgcctgagagtgactttgagttcactcactgtatttatctgccctttcatcactgactgaaagattttggtatgagctttcttggaaagctctggtatgaggtgctacttaagggacctctcttagtgctgggttcaaggctttgaggaaagtagaaagttggggcgcaatatataagcgtcgcgggcaatgctcaaggtatagaattgttaacagttcacctaaacttgtttatcaccagtcttattacagttggtgtttaactcttaaactcattgttaactgaaaaggtaacagcctgaggtattagcctgagaacagcctgaggctagttctcaacttgttagaggctaacattatcatttatgaaaatcgacacttagtattccttttccccagaagattaaatctaaaccttctttgcattaagtgattatctaaagtcagttttgagtttctgtctggaaatataattataactacacaagacaaacactccaggaccacccttcagctttggtgtagagaccgttttggacgatagagggcagtccgggtgcacaaatgctgtaggaagtggctgaacacagggtaattccggatttggctctcagccccagagaaggtgtgcctgttcctgagtgggctactgttttatggatttggttgttctggggaagtgaaataactttggagaacagagaagggaaggaaaagagctgttaggaatgcagagtctccatctccagttctggattttttttcagaagggcttctttctgtttgggtcatttcactttttgctgacattttggtatatgcatctgcatgggagttggattttatttttatcaagtgcacatgttaaatgcgatttcatttgtctgcaggaaggtgtcaagtagacaggagaaagtgtgagtacatgccagtgtttaggtgttaggatcaggaaggttaaatagtttttcctatgcatgtatttttgtaagtgattatagccaatcctatagcaggtaatgaatcaccatctagtcctttatctttgcatgtgggaaatttcattttgaaacttaggtggccttcttgttggggtaaggaatagtagatttgtttgttaatttttcttatccttcatccttgctcctggattcaaaggaggcaagaactgtgaatgcagaatggttttacaggagctgcatgtcagattgtttggaaattagaaaacagatgggctagattagactgctttaagatctcctaaagttcaaaagcataggtgtgattacttaaaaattattttacttaaggaaatacagtacaaggacctggactgaagggaaatgtctgctcagtgaattttttttaatgctgcttaaatgtttttatttctctttcaattaaaaaaaaatccatacacatgatacatatatactttgtgcaagggtcgaacagcatgcaagtgtataaagagtaaaacgtaaaaacctgctttgattccctcctctgttttcactcccttcctgaaagatacttatattaaaatatgatgtgtttttctagtcttttttctatggatttagacacaagcacacatacaaaccaattttattttaacttgagtaggagcatatttcatgacttatacatcttttaatgacttaactgatgttagttttctcagatgtgttctgtaataccgttactaccttggatttcttatcctttctttgcaaatatctctcacacatttctacttttatgtgggtgtttatttatttacttaaacttgttatggaaaatttcacacctatataaagaagcgagactagtacagtgaacaccacatatcctctgtccagcttcgatcattatcttgaggcccgtcttgtttcatccttactctcatctacctccacctccgctagattatctagaaacaaatgccagacatcagatccttgcatctgtaaatattgtgtgaatctctgcatgatacagccttttcaaaaaatgtaactaactataatactattatcatacctaagaaaattaacaataatttttccatatcaccaaatagtcactaaatatctagcctttgctcatgtttacctgtctcacaaatattgttttacagtttgtttgactcagtgaacaaataaggatgaccgatagaatcggtctgcttttttgggttttgttttgtgcaaaacctgaagctttatatttgaggaatttgcaggcctgattccatgcatggtttaaaggaaagcaaaggacaaacttgcagcctcactgtgtttaggcactgcgaatacttagatagcaggaggagaactgtgagaaaacatgcagaacactgggttagggagggtggagaatacaaggccgtggagaggaaggctcagtgtcagaggagacgtcccagaatcaggcagccctgcaaagtgctaaaaatgctggagagcgcctccagtgattataatacttggcctgacctgagtcagatcatcatattaatacttctttagctgcaggttttcttttcagtctcttgcagctttggaactaatctctgatttggggatacataatgggaaaacagaatgtgctgttcagaaattcacttttcagtcaatgtaaaccatgtgttctgtaaagcaagggatgcttacaatattttctccattataatgtaatggagaccttggcagaagaagatacagtgccttagagtgcatgccagtagcagggctggcatgaggccagtttgactaattgcagtcgtggctctttttgagatgacaaacagactgcatgtggatgatcttcagcgtaaggcatgcttctgattgctgctttcctactgccagtgctgaacattcaccttaacccccctggaacagaataacaagtttggggccccggggacagaataacagtaaaggttgatgtgatatacaactgcttcctttctctgcacatacacacccacttctcctctggggctgtgagtgtaatagcctaatcacccacgaccctggcttacctggactgcctggtgcctgaatattgcatccatgtctgcttctctgcacataggccatggggcccatagagtctgcttgccatcatggtcatggaacctgcccaagttcatgttggatggtttcagtgctgcatgataatcaggaaaaataagaccgtatgttggtactaaggatagttattacattttacagagtagaccggcagctggagaagtttttagcctgcaggttacctcactcaccagttcttggtttcataaagcttaaacaaacagagtgggatttccaggggtggtttgaaaatctttgaacctaaactggtcatgttagaagggaatgtaggttgtcatcagggcagggaggggattggtagcaatcaatattgcaaaaaatgtggtttctcagttgagacatcttggctcagactttgtagtgtgtgttgccctagaaagtgatttcgatgggtttggggtcctgggagagaataacagtaaaagttggtgtgatatacacctgcttcctttctctgatgaagtgtcattgtactacttgctggatccagttaaaacaatgtggtcactgttttctaattaaggagagtaacggctagtacaagcaaactgcaagagaagcactgagggtttaattctaggttctgcttcctgtatagggaattgggttaataagactaagtagctggaatggacagtgagagccggtggaggctacatgattgacatgtaactctgagatgatggtggaaagaactgcttgaggcagggattggagagaggctggggtgtaagcgatgtgaaatgtgatactttctggccaccactgctttccaggaccattgtgttctgagattctagccagtggttggtaaatgacttccccaaccagtcttcccatgcagaactgttactcctgttattgtaaatgtgtttatttataaagtatgactagggagaggtgaatgggatctgagggaggtagcagagaggctgtccgtaaggtgtcctctggactatgatgtgtttcaaaaactgggaagtaaggaaagggtatttaggaccccgggggaaggctggtgattcaaggatagaacgcagctgatggccccgagatgcgtgtataaggcattgtctttatagaaaactgactctgtaaacgttagctggttttgataataaagactcagtaattcctgttcctctccacagtgtgtatcagaataaagtcctttctttctcatcgtttaacaaaatactttgctttcagggccctgttggctggtggcggcttttctacgtggacttaccggcaaggctacgatgtcagcattcctgtctatagtccactgtcagctgaggtggatcttccagagaaaggaccagggtaaggtacattcatcccagccaggtgtgcctttactgaatctgtgagatgttgatgaggtttagtgtggtgggcatcaaagcaaccaatacatcagttacagggtagggtccttgaggcactgaggcacccatctttcccacctccatgcagtctcattcatcttgcagttttctctgtctccttaaattcacagtgctgtctaccaagttttctaagccaggaatccatgtggtatccttaactccgttctctcctttgtttcctatatcaaagtaggaagtcgtattgattctgcatcctaaatacttcctaggtctgtctgctccccgaatcctcctcctctaccctagaccaggttactgtcatctctccattggattgctgaaacggcttcctatgtggtttccctgcctctggtcttgctcccctcgagtttgatccttggcttcacattgcccttaggataagattcacgttagtccttagcccacagtccctaaaacatctttcaaggctctctttcatctgaccactatctccatctttagctttgtgtctgagaactttttacttctttcagttcctagaacaagctgtgctctctcagtttttctgggcagcagacacattctctactgtctgcagaccttcttcctcgtcttcattagtctaacatcctgcttgtgccttaggtttcagcttgaaaccaccttctgggatggggtggagggggtaccttcttggcctctgccctggctcctctgctttatgctcccatagcagcctgcacgtctcttagagtgatgcccatcgctgcacacatgatgcccatcgtgatgacttgctcaaagcctgtcttgtttggattttggattttgtacgtgcagtgaagctgaggttaggtttttgtttttgctttgttttgcttttttaagtgacagagtcttgctatgttgcccaggctagattcaaattgttgggctcaagtgaccctcctgcctcagcctcccaagtaacaggaactgtaggcccatgccactgcatccagctgtttttttaaactaccatatcttcagtgtctggcatttcttggctcatattttagtatgtgagggagtaaatgaaaagggctgacaacatgaatgtgcagcatggatgtaacctttttttttctgtagtctatgtaaaaattgtgctatttcctggtgagaatctcagtgagctttaaacaaacatgataataaaagcatcctttacttgtgtggaagtgctcagaagcagaggtgaccaatagataaattttgacactaaaaatgttgtatttggtttgagaaatgggtctcatggaaatagtttgcctggagaccattagaaccattctttaaatatttcagacatctccttagaaacctttgtggactctgagaagtaagagaacttttctcaggagaagacatctctctcctgtttgtgttctaccatgtggcccgggaccaaattctgaaacttacattagccattcacttagcaaattttgttatgtagacgatgtgtaaagcccaggtgagcttgagacatttttgttcctacccttaggcaaatgcggagcaagactgagtggttcatgaagttgttgcttaggacatcttcctggatttttctccctttgtggactcccagagttgacttattttattttatgtttaaaattgagattaatttatataccataaaatttactcttttaatgtgtataatttaacggtttttagtatattcacaaaattgtgcaactatcatcaggcctactacctaattctagaacattttcatgactccacaaataaacctaatatccaatagcagtcagtcctcacctctgtccccagcaagaatccttaatctgctttttctctctatgggtttgcctattctggacatttcctatcaacataattgtacaataaatggtcttttgtacctgtcttctttcacttagcataatgtttccaaggcttattcatgtaatagcatggaatcagtacttcctttgttttttggctgaatatttcatcatatgaatataccacattttattcatctcttcatcagttgatggaaatttggattatttccacctgttagctcttatgaataatgctgctatgaacatttgtatacaagtttgtatgtaaagctggtttcagttctcttgacctaggagcagaactgctgggtcatacggtagctctatgtttaactttttgaggaactgccaaactcttttccaaagcggctgcaccatttcacattcccaccagccatgtatgagggtttcgatttccccatatcctcactaacccttgttattgcctgtgttttttattctagccatcctagtggatgtgaagtcatatcttcattgtggttttggtttgcatttccccactgactaataattttgagtatcttttcatgtgcttattggccatttatataacttctttggagaaatgtctattcagatcatttgcccattttaaaattgaattgtccttttatcgtagagctataagaattctttatctataacagatgttagaacctcttcagatccatgatttgcaaatcctttctcccattctatagactgcttttcactttctttttttttttttttttgagacggagttttgctcttgttgcccaagctggagtgcaatggcgtgatctcggctcaccaaaacctccgcctcccagattcaagcgattctcctgcctcaacctcccaagtagctgggattacaggcgtgtgccaccacgcccagctaattttgtattttttgcagagacggggtttctccatgtttgtcaggctggtttcaaactcctgacctcaggtgatccacccaccttggcctcccaaagtgctgggattacaggtgtgagccaccgcacccggcctcacattcttgatagtgtcctttgatgcacaaaagttcctcattttgatgaagtcaatttatctatttttcctttggttacttgcagttttggtgtcatttttaagaaaccattgcctaatccaaggccatgaagatttacccttacgttttcttctaagagttttacagttttggctcttacatttagatttatggttcattttggttaatttttgtatgtggtataaggtgggggtccaacttcattcttttgcttgtgtatgtctagttgtctgaacaccactggttgaaaaaacaagtcttcttctattgaatggtcttggtacccttgttaaaaatcaactggccatagatatatgggtttatttttggattgtcaattcgaatctgttggtctatatgtctattatgccagtactacattgtcttggttaccttagctttgtattaagttttgaaataaatgtaagttctccaactttgttcttcctttttcttgttttaagagacgaggtctcgctctgtcaccctggagtgctggatcgaatgggtgggatcataactcactgcagccttgaacccctgggctcaggtgatcctcctgcctcagcctcccaagtagctaggactataggtacatgccaccacgcttggctaattttttatagagatgggttcttgtgatactgcccaggctgtgttcttctttttcagagttttcctgactattcaggtcctttgcattttaattaactatttttgttataagtaaatataaatgaaaaacagtctaaactctttgtgcttatgcaactacaaaactgaaacaaatttacaaggttaaatataagcacatctacaaaactaataacattcagattaacataattgaatatgatagctgatgctgtttctttgaaatgagattgcatctttaaggtgaatatggagttaattacgggtttgctgggtttgatgtgcctatactgttgtatgttgggtgaaaatgtacttttttttttaaccatgttttctatttgaaacattagaagcttccctttagatagcatattgtgacatcatttatcttcatatggtacagatgcatgattcatattttttccaatattttattatgaaaatttccaaacagcaaagtttaaaaaattttacactgaacataatgtatacccacagcctagattctatctgcatttttactctactgctttatatgatttacatttttagtgtttctctcatctcattagtccactaaatagaaacttggaagttgaatattttttagcagtattcatcattaaatatgagcaaaactatccccatactaattttttggattatcatcacaatggaaatacacaaataattcttctagtgaattcacggacagaagaaactgatataattcagtgccctatttcgaggttagattttcataaattcagaaaggatgagatcatctacataagccccgctggtaccctttggggtggtacaagtttctgttatgtgcctagggtcttaatttggcatatttatgtagcacgagatagaaataactataagtagggaaaaaagttacttctctgctgcttctgtgagcatttacttaaatctgttctgtgatttaaaaagtttttattcatttctttttctctttttttcctcctaaagttgttctggaaattatttaattcaattcagtttagttcagttcacttcaagtcaaacctttattgaaagcctgtttggaccaagtattgggctagactgctgtctctcatcaggagaaagggaatgattatgtcccccaggggacatttggctatttatatatatatatatatatatatatatatatatatatatatatatacacatacacacacacacacacacatttttgactgtcatgactgtggggatgtgtgtcagagggtcctgaagaccacttccagttactatgatttgccaggagggctccatgactcagcatataattgtactaacgtctgtgacttattacggcaaaaggatgcacagcacagtcagagaggtagaagacgcatggggtgaatctggagaaaccaggcacaagccttcaagtgccctcttccagtgcggtgcacaagatgttctcagttccctcagcagcaagctgtgacaacacttgtgaaatgctgtcaaccaagggagctcgtcagagacttagcacccaggacctttcttaggagctgattgcataggctgtctctgcctggcacgtgccaaacttccagactcccagaaggaaagcatgtgttcagcataaaccacatttgtttgtgcagtttggatacagtgagccactcttatcagttccagggatgatgggaaccctctccaaatccaagtctccagatgacagccaaagaccaaacttataagcaagcctttctaaggagaacactcaggcctgctatgttaattcttctctgcatagggcagggcagcccccaacatcaagaaatactgggtgcaaatgtcagcagcgctggggttgagaaaccctgggtgaggcagagagtgacatgtgaggactggtctgctaggactgctcagctgctgtgggcctctgtcttcagtgcacttttcttgagaccacttgaaccaaactctctctttattgtttaatccctctcatataatctagctctcttatattggtttaggactcttaatccccttcaggtttaatccagggaagaaaactgaaaataaaagctttaagtgaaaataaaacaaaggagaaaaaccactccaaacagtaaaactcattttcaaataattagtttcagagatttagatacatcaatatataattagtttcagagattatatattggtggtattttcctagtaatttagtgtctctaatttttgtgtataactcagctggaattaatatctttaactagatcctttgaaaaggtgtcagtttctaaagttctgtggttcaataacccgataggagtgtccagtttatcttcagggtagcaccgaaaggtaaggctgcgctgagcatgtacctccctctgctggctggtagatggatttctgcaacctggcttgggcccatgctgtccatttcggtgccagcttgcagtctggtcatgcacttgtggtgttaacttttatataagaacatctcctaccaccacccctccctgcccccgaaaaccaagacaaaaaaaaattaaaaagtaaagacaggttcagactcatcatcctgccagggacgtgggagaaggcagggtgggccatctcatggcagtgttttgggtttgttgatccttgtgagagttgctgtttaagggaattcccacatctcttgcgggctatacagaatagtgagagctttgcttttatttttgttttaaatctctgtcagcatttgttcaatgggaagtggatgattgttgctattgatagctgcttctcacagctgttttggcctcagctggaattcttgtcattttccttctaaaatgaactaaattgggagtttacaactgttactattgagggagacttcaagttctcagcatggttttgcttaaacttagatatcagcactgctgggaggagacatgaaagctatagctagtcattttagtctttaaaagaaaaacaaatccaccttaaaatttagttggtttaaaactaaaatgagcatactccttcaaccatctgccaggtcagggacagccagcatgcaagcaagggacacatttttagacttgttcacatctacacttgttcacattgggtggggaagaaggcgcacgtggaatgttcaagccctagtggggtgggagcttctgcttaagagaagagtagtaaggtagcctggtgctaccacatttatgttgaaaatggagtagcagtagagcggggatccagtgatcctggtaactgaatgtctaaaatagaactttatttctcatcagtgaaatctaacccagagtctttcttaagagttttctttgagcaccacacatcaacatctgtatttatttctgtatctgtacagacagatgtctatctatttgtgcatattgaaaaccatgcattcatctcagtatctccagttccatccaacactgcaggggcattctggttttctctctttccatatttgtaactcccttctctgactcctagaaatctggctctctttatcctcaacatctttacttatttgatcaaccctcttatattcatcaaacttctgttgcccccctgcccccacactgcacagaggccttccccacccctcctcatccctgctcagactctgaccccctacattgtgctgccctgcaccctcccagcacagatgcctttctcacacttcttgggttctagcactggggtgatgctatcattaccatcattctccccacaacttgggcacccttctcagcctgcccaggctctaacactctcttctgagctgcccagatgccctcctaacctcacttggtctccagcatccccataacccttcccccagcacagaagccttcctttcacttctggggctctgataccctgcgccaggctaccttactactcttctcttaagcagaagctcccaccccactagggcttgaacattccacgtgcgccttcttccccacccgaccatgcagaaatgccctctgggactccaatactctatgcccttctgcctggacatcctctttactcctcttggatgcccacctgtttattctttttctggagagggtagaacactagttttgtgctgtcagctctacttaaagagaaaggctccagaaacatccatgagatccttcaaagagccagcgtcttattgtttggaaagacctttaaagaccatttagctcttaacttgatgcatgacttttcagtaactttttactgaaaaagtttctgatttatactgaaaaatcaccaacttacaagacagtccatttcattattgaatagctttaattattaaggaagtttccctgcttgtcttgtgggtttgactgtaaattttcctcttgcttaaacaggtacgtttgattatagaagtaatttgagcaaagatggtgtttagtctgagatgaactgcgggtgctccctgtatgtgatctcgccatcactaagtcatcctctgaaaattaatacttttacaaaagaaaaatgattgaggctcaaggcttggagtagaactcaaaagcctgttttagtgtctagaaagaatacttttggctataaatattgaacatattgctcaataaattgtaatttaggaggaaatgggccaggaaaaaggaaccagtctgtacagctgatccaaaccatctccctgctgggttgctgttgtatatctttcttatctccacttaccgtcatcctggcctctggctctcacctaccttgtggcgtagctccattaagtagaactttctgcagtaaggacgtggtcaacgtttgtgctgtcaggcagccccagccacatatggctatttgagcactggaaatgggcctagtgtgactgacaaactgaacttttaattttatttacttttaattagtttaatttaaatggcctcacgtggctagttgctattagtgaagttctagggagtctgctggttcctttttttcttaattgtgatgtgttaagtgccttttgctcttagttaggccaaaaccagaattgatcctgaggacgtaaaagcagtctggctgtggtataggttgctcttttctctgggtttgtatgactagtctagctggctaggcaggtgttcaccttcactcattgctttatgtgatttggacctgaagcttaatcctctataaaaggagatgaccttctcagttagagtataattattgagtgagatgctccccggctagaacttccaaacaagtctgagtaactaaggaaaagtaacaattaccattctctcttcaaagccaaaaacaaacaaacaaaaaatggatgggttcacaaactctaggttgcgtggtggcgttgcctgtgagagatacgtagccctagtattttccctgggctgtaccagtttgagctggatttcagtgtgtgctgcttctaggcttaatgagtgtttcatttcttcctggaacatgctttctgtgattcttctctttgacactgattccttgtggtccctcagcctaaacaggttgagtatcccttatccaaaatgctcaggaccagaagtgttttggactcctgattttttcagattttggagtatttgcgttatactcttggttgagcattccaaatccagaaatctaaaatatttcaatgagcatttcttttgagcatcatgttggcatccagaaagctttggattttggagcattttggacttcagattttcagatttgatatgctcaacctgtataggttttatgttctgtaccctctctgtcttgtttgagtcttgtcttccaggagggaattacttcccatctggtctctccaaaatcttccccttgacttcagacttactaactttgtgtttccatatctgtctcttgtggagatctgcatggcactagacccttggagatctttcttccctctgtcttgtttgagtcttgtcttccaggagggaattacttcccatctggtctctccaaaatcttccccttgacttcagacttactaactttgtgtttccatatctgtctcttgtggagatctgcatggcactagacccttggagatctttcttccctctgttttcttttacacatccttgccatccagatgttaagactggagattctatgctttgatgaagatcgttttttctacttcttgttttcaactaccaattcggtctccctcccatttatgtggccttgatgatggggactttccctatagcctctccattgcacagggatgctgttagacagccaggagcagccctttccagagcccttcagttgcctgccagtgcttcccatcaagcttccctctttccccatttgaagaatgcagccagcttccagtcgctttcagatcagggactcagatgtaactaagacaacacttcgatgttccttccaaattatcagtttctctcctacacacacacacacacacacacacacacacacacacacaatttatagcatgcgctctcagcttagcatattataagcatttcctcacgatatcaagaactgttcccaaataagatgtgttatgattgcataatatttcagtgtgtgaatgaatcatatcttactttctcacaatatataatattttaaatatttactaatactacagaagataattttaaaaatcagtggaggtgaagactggtaaggaaacacttactgtcataagtttaatatcaaagtttgtcttaccttgactaacataccagctgcaattttccaatcacctgtttttttcccttgtagtccacggcaatacttcctcctgtcatctcaggtgggtctccatcctgagtacagagaggacctagaagccctccaggtcaaacatggagagtcagtgttagtactcgataaatgcaccaacctctcagagggtgtcctttctgtccgtaagcgctgccacaagcaccaggtcttcgattacccacaggtgctacaggtgagtgtcattcattacctctcgcaaaggctcaggagagtttgcttacatgggttaaaattgagcccagcgaacctgagttgttttcagcatgcaactagaattacccaaggggaagaaaacatagcattgctctttactggacatgtagaccttcaggtacttggatgtctggtgtcttgtgttcgtgcaaagctgcttggcctatgagagtctatactcctttcagatattcattatacttcaaaaagacaagtctcatagattcgcagacaagccacatggacaaagcaggcaaatgtatcttgcttttacccccatattcataaggcagtccagagaaattttcttctttgaggtggcaacttgcatcccttgaccatgctggcctacagagccacagtgaactttccctgggagtggaggggtttaggggttgttttgattgttttgctatttggagttcttgccacctttagcatctcctgtcagtagcatgtcctttatttacatagtgggaatggctgtacttccataaccatagggaaagcggtctctttggggatgttttatatgtaggatatttgacattccaagggtatgggggctaggaaatgagaaattgagctttgttcacttaaatacttaaaatggacacaggttagctcaaggagaaacacaaaggagctggtgtgatttttttttttttaatctccagagagcttgcccatactgggattgtaaaaatacattcaaaaagtgctgcactcctcctggaatgtctggctggtaacagtggtgatgagggcaggagtatttatagtaacctttgtctagacaggaaaaatggttatcagcacgtgtgtccacatctggatgctgactcttgaggtcaggggagctttccacctgcacctccgggtaccacgatgacttctcttcctctcctcttgctgcttttctcatttatccccagaggtgtttggaatatcgaattcctttatttctttttctgaactttccttttctctagctttaaagattagtttttggtttttttaaaaaatctttttcctccttcttaagaggcaaaatctgggagaaacagaatgttaggtagttaaggtttctgtattttggtttacctattgcagctgttttttctgtggtacatctctccttttcccaagtattccccacattgagggggtttgagggagtgaatgaggaagaaatttttcattagattttttttatagaacatattagtcttaatatcttttcaaaggcattgaattcatgaaatgagtatcttctatataaaaagcacactgttagatgctatggggggtagaaacatgaaaagagatttgataccttccctttagggggtcttgtagaaagcctgaaattcccagacaaaataattccattacaaggtaggctgaggtaagtactgtaagagatgtcagacagtgtgccgtggtgtgtttacatagtacactagggcctaaagagacccatttgcaggaagtcacgttgttagctgtctaagggaagactttgacattgaccttgaacattttcagaaggccaacagtggtggcattgaagcaatactgaagagtagaaatattaatacaaaacattgcagccatttaaacttttcaagttttacaggtgtgagctgttgtcttttggcatttttgtgtcaagatgcctcagtattgcttggcgtcaacccttgtagaaactttgtggtctgtagggatcaaagttagtggatcagcaaaactagtttgtaatctcttgcctctttgtgttcctgcaggaggctactttctgtgtggttcttcgtggagctcggctgggccaggcagtattgagcgatgtgttacaagctggctgtgtcccggttgtcattgcagactcctatattttgcctttctctgaagttcttgactggaagaggtgggtagtacctcctagtaaactctacattagtggttctgcgtatattacaaataaaatctcctcaggtcattgtaatgtataccctggttcaagaactactacagatagtttttctctattttccattaggagagttagtacactggtctagagcagttcacaaaccaaggccagtttgcaggctggctgtttttgtaagtcaagttttattgaaacacagccgtgtcccttcctttacgtatagtctggctgttattgtgtcacattggtagagttaagtaattgcaacagaaattggatgacatacagggcttaaaatatcactatctggcctttcatcacaggggtccccaactcccgggctgtggcctgtttggagccgggctgcacagcaggaggtgaccagcgggccagtgaacattaccatctgagcctcgcctcctgtcagatcagtggtggcattaaattatcatagaagcgtggaccctactgtgaattgtgcatacaagggatctaggttgcgctctccttatgagaatttaactaatgcctgatgatctgaggtggaacagtttcatccccaaacgattccctgccaaacccagtctgtggaaaaattgtcttccacaaaaccagtccttggtgctgaaaaggttggggactgttgcttttcagaaaatggttaccaacctctagcctagaccggtgttcaactctgactacagagtagactcacctggagagcttaaaaaaaatgccttgcctaattcttggggattctgaatgttaaagctcccaggtgattctgatttgtagtcagagttgagaaccactggtctagagtctattgaatttgcataatgttgtagatggtggtggagagcctcatgtagatgaaagcttagagacattcccagtgtacagatggacccagttccattctactgggtgttcaccatttatattgcaataaacagaatagccctctattctcatgcttcactttcccaagattttgcagggtgaaggttgttgaaaattaattccattcatatctatctctcagtcttttccttgcctcaaatgcttactggttttttcctctcccaacttttttggtatttctgtccaaatctgatcaccacaggtatttgaacaacttgaaaagctctagttcattcattcattcatttattcattcatctcacattgattggaaaccctcttgtgagtaacatagagtctctgtttccaaggaggctagaatctagtgagagaagacaaaccgatgataatgttttgtggtaaatgtcatagcagctgtatgcacaggggaccatggaaacccaaaagagaggagggagcctaactcagcttgaaagaggagagcatgtagttattcttcatgccttagagaagcgatgagccacttccagcatttatctcccaatgaaagcatccattaagtaccttttatttaccagatgctgtcttaagtatagggagacaaatacaatcaaggccaaaccttttctcagggacactcatagtgtagtggtggaagacagaggagtaaatcagcagttaccaaatcctgtgatgagacagctgtgactggatgggatgccaggaggagggggagacacacaccatcattggcagtgggattggtgagggcttcacagaggcggtaactctaagctgagtccaaaagggtatttctatgagaatctagatctgcttgggtagtgctaattatggatttaaagtcagaaggcctaggttgagataaccagctctctcactggctggctttttgatcttggcaaatgacttaatcttttttgagtctcagttctcccatctgtatagtggaaatcatttacttacttaacaaatgtttatcaagtgctaactgtgcaaggcagtaatataccaggtgctgaggatacgctggtgagtggagccaggcacactttccgtcctaatggactagcctagttggcagaagtgaggtttagagtttaatcattaatttatacaaatgtaattacaaactctgccaaatgtcgtgaaggaaaagtgattgttgagtcctctctttctcttacccaccacatctaatctgttagcaaaccctgtgggctctaccctctcatccccatcatcaagtcttccctcatctgcatctcttgcctggcttttgcagtgttctccagttgttctctctgctcctgtccttgctttcctgtagtttattctaacactttagatagaatgatcctgttggaacatggttaggttatatcatgcttttgcccaaaaccctctcatggcttgccatctcagaaaaaaagcacaagtctttcagtggcctacaaggtcctatactctttgctgtgactctgtctgtcccatttcttctttcctggtgttattctctgccttctttactctgctccagccacaatagcctccttgctgttcctggaacttgcccaccatactgcttcttcagggctgtttgcttgttagactttttgcctggaatgctgtttcccaggcattcttctggcctgcttactctcttgccttccttgtctaattaattcactgttgggttagcacataatagggcttccataaatatatgccagataaatgaatagatttgcatagatagctaaaggagaaaagtatttgttaacttagaaacggaataaaggaagagtgtactaggtgggtgggatttcacatgcaaaggccctctggtagggcagagcatggtgtgttcaagtgactgaaataataccagtgtggctagagcacactagtggagtggaggcagggtgaaagattaatggagtagggagtgggaggtaaaaaaatggagctgtaagagaactcctttgagaagttcagccagtgaagaagggaggggaaagagataatacttaccggaagggatgtggggctgaaggaggtttgggatgttgtttctgcttgtgaaatgaaacaagactgtgtgtagaaatgctttctgtgaagggctgtgtgtatgtaaactgttttgctgttgtctccagagcatctgtggttgtaccagaagaaaagatgtcagatgtgtacagtattttgcagagcatcccccaaagacagattgaagaaatgcagagacaggtaagaggccaagtcttggggaggtgacatgggtggtaccgaaatggtggccttgactggatacagagggacaggagctgaatgcctgagtggggtttacttcctccactagatcaactagccaaactgaaacgataggaaattaatgttaggtgagttgcatcaaataaggtttgaaataataactctcagagaactgtgcagaggtaagcctactgcaattttagggtcttaccatagcagatgcaaagctgaagctctttggagggtttgtagtcacagcaggtgatagtcgtagtgactaagacagccatggaagctggaccatttcagggcaatacttctgtgtagctattgaccatgatactattgctgcacaaactagcccagcttcccagttcagtcatcctttgtaattcgggaatccttccctctcttctggaacatttgccattttcctgcctctctttccaaatttctcttctaccttctgacaccccattccctaggctgatctctgactgtctcatactccacttgatgtcccactgagtcctgcttccgtttctttgtcctgaaggacatttaattgggtttaaatatcaagcaaggtgaaaaagttaagaagactatcccaaaaatttttaatggacttttaaaaaggtttaatctttgtcaaaatcaccgatgtgggagaagagcaggaaaagaggcttggcggattctcagcagtacgtgcgtaagtgtcccatgccaccccctgctgttagttcggcaccctcagcctcaggcagagagcctgcatttggccatgtcccaagaacaggccacaggcttctgtctggatggggacagcgcatctgcctggctgtgtggggaggggatctgaggttctgactgttacttaaagtttcactttgacctcctgcttgaaccccactcttcccctgacttggggctctgcagtgtgactcaggtttttctcagctgatttaggaggcagctctcttgagtctatagcatcagttaccacttcttcctttacttttcagcttccacattctgatgctgttatcttgtctttcattctctttttcttaggggatacataccttaatttagaaaattccccttaattgtcattttagagttttaggagagtgaggttagtggatgtgttcagtccaccctctttattatgatagtgaacttcttatcgacacagattaagtctgtaggttcttacctcagattgcctggcttgggtatcagctctgtgggttacaaactctgtacccttaggtaaggatctgccttctctgggcctcagtgacctcatctgtgcaatattttggcattctggtttgaacgcaaatcgcaggttagttttagcttccctgcagtttatttatagcatcctcctgttcgttttaagtttctgggtttcccaattgttatttaaccactgatttcatctaagttttagtgaatcagaaaatcagtccagagatctctagattttttatctaaacctgtggttcctaaaacttgtgtagaagaaaatgccccttgaggagtcataatgtttgtgcattttgtgttaccttttctttccccgccgaggggtctcactctgtagtgcaggctggagtgcagtggcatgatcttggctcactgcaacctctgccgccagggttctagtgattctcctgccttagcctcccgagtagctgggactacaggcacgcgccaccatgcccggctaattttggtactttcagtagagacaggatttcaccatgttggccaggctggtcgaactcttgaccccaagtgatccgcccgcctcggcttcccaaaatgctgggattataggcgtgagccaccacacctggcccactttgtgttactttttatggaatcttgatttattagtaaaactaaatatagaattataggctaaagcagagactattttatactagaatctagtctagaaagggtaagaaaaaactggggaggttaaaatgcacaaattctatccagtttcttctccacccctccaccctgaagctgtgaaagagaatcatttggtttttggagtggcgtctactgccagctcacagaggactgttgcccataggagggtggtgtgggaaccacaggtctgagataagcttggtcattttcagtgttggctcagaatcatagaacagttgagaaggaatgaatgctggtcatttaaaacagcgtacttttgggttatttgggttcaaagagacacactgagtcaaaagacttgggtttgatccctggctctgtccgtttgattgcatgaccatggtaagtccccaagctccctaggcttccatttcctcatttatgaaatgaaggggttggctaaataatctctcatgttccatgtggctgttaaaaaactctatgaaatgcttatccctaccaagaacattactctccttgacaacattaataatttagtggtcatctcttctccccttgaacagctctagtcacaagggccacttgcctcctctagtggtgaacagtccactatgccagcttaaaaagaaaggtggtcttggcactttcccggccccctttctaactcccttttccgctttctgacggcctctttccctgtgctgctttcggaccatctaaagctctccactgcggcaactcactagtcccactcccctttctctgagtaatccatgttcccaaaatgacctcttttcttttcctaaccccacatttctagagtgggctgatctcaattagatatgagattatctggttaaagtaatttccagttaggtataaaggatgactaggtttcttcaactactactagattccaatagcacccctcccctcagttgtgatcaccaaaaatgtctctagaacattgcttgccaattgtcccctttggggttgggggtggagggcaagcaaaattgctttaactgagaaccactgttctctatagatagttaatgtctcatctctctaaaattagagttctttggttctataacaaaatatactgtttccaaaacattcttgtcattttgctttctgtttaccttctattgatttaacctgaccttggcaggagtaattaaaaaaatggtaaaacacctgattctgaaaagttcttataccttagtgaattctctttagggaggtcagaggtgggtctttttgcaagacaggcatccacttttaggggaaagcctattgtatcagtagttgataccttggagcccctagatgatgtatcagaatgaactgagggtgaggaacagagtctgatttgcttgctgagaaactccagactagcttaatggagctgcattggacagttgtagccagcagaggtctccatccacttttaattaactcattttccctctgagtatttaaatctttccaagaaatcctaaatgccatgagccactctggtgcttcacactgacatcttcctgatagctgctctctagagaccatttctttcagatgaagaagaagaaagaaaatcctgcttagcacaggattttactctccctagatgcaatagagctaaagtttctgatttggccccagaaatgtggggtagggtcttggtgaggaaggtattggagcaacattttgcagcttagagtttaggatcagaaaggctacaatctgacagatgtctaaagtggtgaaagtccttgttgtgacgggaatttgtgtgtaccaagggagaaagtcatactacctgacaaagaaaggaaattaaattcccttagatgtgatagtagcagccaaaaagttaactacaaggctagagcctaatgtaagtaacagctatagttagactaagacttttgaaaaaaagtacaacctgtgtctctggtatctattcctgaaggccaccagtgagcagtgctgccacacgtggcattgggcagactactgggggcttatagggctttttgtggggaagttaaaaaacagttccttaagtcagtagaagacagtagttgtaacagtataaagctgacttctcagttggccttttattgtcctgtgagctaatgattaactagttaatttattgaatccctaatgttttttggtggggggagagattataggagataataaaaaaaatctttgatccccattcacaaagggcttgtgttggggatatatgggtataagcataaagaaagttgagaagatgatgccgatatttctaggtacattatgggtcattaagggtctgaaatggaagggagaaagttggggctaaagctgtcaggatgaatttcttggagatgtagaatctgaggtaggccttgagatgggagttccatcagccatctttcttatgttggaaggcaggcagaagtatgcagctaaatatttttctgtagtcaaatggaacattcatattcccagtctcccctgaatcacaaagaaaaagtacacaatctgggatctcagaaggctggatagacactagactgtatcgttagaaatgtttgtatggatagggaggaaggtgtaaatggatccccagtttatctgttgagtagaatttccaaacattcttttattggtcagtggctccaccagcagtgacctctaacctcagccacactaggaggtggaagtcaggagcctgacttgcctttgaactcttctttgtactcaattgactagaagcctttgaggtggcagaaacattcagcatcttcttttctctctagcctttaacacttggggtacattaaaataccagtttcttttcagtctattacactgatccatctcaatgtgccttcatatttttctattaagcaaaccaaatattggtgctgcagagaagtacttgaagatgtagtgggctgattaggaaaaagacaaaacaattttatttaagaaaataaaacctctagactatagttgggcctagtagtgatcaagaagagagtagaagaggctacagaacagtaaatgtgtgcatacaccgaagttcctgtactttataggagagcccctatcaggggcctcttattttatcctacttgcatacaatttcaacacatttgaattatttggtttccatagccgtagtagtttggaagagacacatttaaagtgaagaaagactactaacagtgaaggtatctgagatgggttatctgctaatctggtatgaataaagaggatggaaatactttttttttttttttttttgagacagaggctcgttgtgtcacccaggctggagtgcagtggtgcgatctcagctcactgcaacctctgcctcctgggttcaagtgattctcgtgcctcagcctcccaagaagttgggattataggcatacgccaccacacccagctaattttggtatttttagtagagatggggttttgccatgttgcccaggctggtctcgaactcctgacctcaagcaatcagccctcctcagcctcccaaagtgctgggattacaggcatgagccactgcactgggtggaaaagctatttttaataaaaaagaatgctcagcatattgaatgtaaggatagccagcttttcaggtttcactttatcctggatatatcattataagatggcagaattcctcagttcagagaagtacatctttatttttcgtatttggaatttctgacatccaaataagtcttatcatcaatttgaacatcaaatgtagtttctgtttcttcccacaaaactgttattaatgtggcatcttaaaattgaggaaatacagaaattactattcatggtgatgcccctgaatctttaagctaagtttaattttgtttagcatatatgtttttaagatattggatcttgtgtaatatgttttataaagttttctgtttaagatgtttgtttttatttttaaaaagtgttatttgcttaaaagtgtaaaccctcagatgtctagaaaccttagcaacccagactgatgtactgagggttccctgtgctgctggccagtctgttatgtccatgacagttacatagctgtctgtgtcaatttctccctcctttcccacccccagtgtacaccagtttacaaagcagactcaacagagtagtaagctaggccattagaagagtaatctgaatttttttatgtgaagaaactaaggataaagagacgtaaagtaatcctcccaagaccacacagcatgtgagggacagacaagcagcacactctgttctgctgcctacaacttcattcaaaccacagagctgtgtggcctggattgagggtaaaaatcaggatgagcttcctaacaattcaagctaagtgcttattgaatagtcttccttgaaaaagtggttgcttgagacatttaggactggacacagccctggaaatatattatgaggaatgtggaaaaggtttcactctaatttccagtatcagtgttataatgtctaccattcttatccaccctgcaccgccactgtgaaattgaggattttaagaagtatacataaactggactcttggggctttttaaaaaatgccaaatattccctgcccctcctcctcccctctccagtcctgacatgccactccaagctgtgtttcgtggtctctgcttttgtacttgcccttaaacagttactggctgcttcccttaaacagtgcacattgacctgatccctggagttcttcctgtgaagtagacaaccatggttctaatacaaagggaggctctttggccaatgggagagccttggtaatgggtgtaatcattttgtgggatattttaaatttcacagtttttttttttcagtagcactctatattctgtttgaattttcctagtatgtatatccctattgtgaaggaaagtggtcaacatgtgttgtttaaagcagcataaaataaggtctcatttaattggaattcttaaagaagaccatttttatgtgtttaactatttttttcaactttgttattaagaagcttgttggaaaaagacttttaccaagtatctgatgatgggaagccaagaaaagcattttaatagaactgtctcagatttacaatgcactagggcctgtaaataaattttcctgtctttaaggtttggactgatttgcagttgttttgtatagcttctgagatctaaatcctcacagtccagatggagagaccataaagttactttccctggcagccttggtctgtcttgtctgtgggcaaatacaattgagtagtatgtggatcttagtctgtataggtcacccgttttactgtgatgccagttttaattggtttggtgacttttccaagagcagctcaccaaagcattctttaaatttaggagaattagggtccctaatttcataatgcaaatctaaattctcacagtctagatggagagaccataaagctactttccctggtagccttggtctgtcttgtctgtaggcaaatacagttgagtagtatgtggaatttagactgtgtagtatagtcactcatcttattgtgataccagttttaattggtttggtgacttttctaagagtagctcacctaagcattctttaaatttaggagaattagggtccttaatttcataatgcaatcagttaaataaatatggattaaggacttgctttgttcctagtattgtactggcatgttgagggagattttaaaaagggtgggcacagatcctgtctttaagaaaggccctcaggttgctggaaagagaactttcagtaatacataaattataaggccaggagtgctgtgtactcagttatgctaaggagagccaggaatgacctcaagatcagagtggatcagaaggtgaaaggaatcttcacaactgggtagcctcagatagagagggtgaacatcagggcactgacttccaccaggaggttctgtggagagactagtaggtaagaggagcatctggtggcacaggcacgggaggcaggggagagctttgaataccagcaacagagaacttggttgagaactgaagggaaggacggtaactaacaagcggaaggtaatgaaaagatttgtgaggcaaggagaaagcagtgaacataattgaagagatttaggaaagaaatcaaagagctggaagggaccttagaaattattcaaccctttccttgtattttacaagtgacaagtaagccctagagttgcagtaatcttgagaatgaattgttaggcctagtctgcagctggaacctaggtctcctgactcccagtctgatgatttgtttttttttcatggtgtactgcagtattttccaaaccgaaggtaatgattcattagcagatcatgaagtcaattcagtgggtcacgactggcattttttttttaatgaaatataataggaaactattagagagctttatacagagtaagggtaaatatttcctgtagcttttgttccagtagtgagttgttgcataaaatgtatttgtgtatttcttactgtgggtcccagtccagaaagtttgaggaaagttggtactggaaagcccagtgggcctgtgagttggagagacttgaatttgagtcctgctctgccgggtgtgtaccagttttgtagcttctgttttcttacctataacgtggagctaataatagtatggagtagttgtattgattaaatgagatgattgactcaaagcatgtagattctggccccccactctatgctggccgtcatttgggacaactcctcctggggcagcatttaagtattagaaggagcctccaaggaatgcagagtggtcttaaagaaccacagtaagttacaactactgatgtattatgcatttgcttctgggcttggaaactcgaaagagaatttattcctgtgggttctggtgtacattttacatcttggcatggaagaggcttacttctctctctctcctttttttttttttgcgtgtgtgtgtgaggatcagaatgacttgtagggagataaaaatcagtgactctttagctgacctttttttttttttaattcattggcacatttggataaagtattattgctttctttcccctttccaatggaaaaaaaaatggtactgagccttttcccccttctaatcttttctttgcctgatcataattttatccatttttttaattaaaaaaacttgtagaggaaagttagaatcagaatagatgtttgagtggtaaacagctgaggagctacagtctagtaagtataagctaaaaataaaggacatttttatgtgaatttaggaggactggtcacataccttttagaaatagctgttcacatcctgcagaaaggagaatgagttctgatatctgattttcatggtgccctctgcctcttcacttttcctcttctccccattttgctgcctctgcctcccttcccccatttctttctagccagctccatcccctattggaaatcccgctggaaaggggagacgagcttcatctcccacatgatttgggccaggggctaaagcactcccataaatctgcagctcattttaatgccacgttaaaacagtgtgagcggctggtttccgtggcccctgcccttttctttatgggcttctttggctcttctttataaagaggccctgtggagtcattttaaagtccttatcagtttgctgacagctatatgggcctttctgctgagtccaggagctcaggcaggcgtgtgaaacttctgatattaaaattgaagaaaaatgccaggcagaagggattgggtggtggggcagtggtgcagaggtgaaagactagcaagataattaacctttgcaggtccggaacctcgccgttggccactggtaggggcagggcaggaagggttaggcaaaagagggttttccaagggcttttatttttatcccaagattagaaatgccattccactggcagtttgtgctttcacgcttcagcaagtgagttgggcaacttgaagggttagggtggccaggtttgcaatgaattttttcctaaaggcagtctgactggctggacctctgcttgcgtgtctttgccagctccagcctgctgtctctgcctccgcagcatcactgttatcgaatttaaagggactttcatcagtctgctttgctgacccttttagaacagactgttaaccctcaataatcctcccagagagtttcatggaaacaccaggccctccataaatgtcagcctgcgatgcttggccctttttaccctctctgttatagagaagtagactagaggctgctcctgcctctatcctaccacttttctttctttctttgctggaaaactgcagcagacagctgaggggaaggaaaaaccattacctggatcaaggccagtggtttgatgggagcttcaaaatctttggcatctcctgcccagaatgtttttccaggcattttaaaaagagcatccttactctccttctcctttaaaccttccaactttgacttccaaagggggatggatgggtagaataagcccttagaatgtactttatatcttcctgctcttcttctaactaaagcttttaggaagaggttagtagtgataagcaaaatccaatgggcatatatatttctaactactctgtatacagctttttggcacaaacatgttatttttcctttttcaagtggacatgagcagttttgcaagtgtgttccatttaaaatagtcatttaacttgaggttgaggcaaaagcaagaatttttatagtaagttagtcaaacatatatagctgttgatcttggattgtcattgaacaaataataaaatatactgattcattttattactcgtgtagctgttgtggggaagagtacagtcatccctcagtatctgtgggggattggttccaggacctcctgcagataccagaactcaaggatgctcaagtctctgctacaaaatggcatagtatttgcatatgacctatgtatatcctcccttatactttaaattacccctagattaattatacttcctaatacaatgtaaatgctgtgcagatagttattatactgtattgtttagggaataagtgaaaggaagaaaattttatgtatgttcagtacaggcacagttttttttccgaatatttttgatctgtgattggttgaatccatggatgtggaaccacagatacagaaccgcaaatacaagggaccaactgtaattgtacaaaaaccaaatgagcagcaaaacaaagcaaaatgccccaaactccaaagtggtagaatcacttttccatacttttctgatgactaagttgatatcatctaattagttaagtttaatttaggacagtgaactgggtgttattgcttatactatactcttaacaaactaaacaacttttaagtatgttgaaagttgtcagtaaatttatgatcatgaacaatcttcattacatagccttttgaaggtggcgggtaaaatggtcacactttcctccttgggcatttgttggagaatagtctctaaagttaaccatcggtttaatcccttgtcatgaatccccaatatgggatattgctttaggaaatagcctccctaataaaagtgttaaatgttaatttgcagcctatgtaagaaatctctgattacttggggctggtttcccacagggtgggactatttgacaaatatttctgagaaataatgatcattacaggaagcgaagtgcaggtttatgaattcatgccgtacctacttagacaaatatctaggtttacaatacaataacttgtaaagtatcaagtgtcaatgtgtttggtagagaactcagtgttttcaaaccttcaaataagggttaaactgattaataaaataagtcattttgtttatttgcctgaatttagtatgtagatggctaacatgctacaaatattggcaacaacagaaacataggatttctgtctctatttataaatattaaaataacttactatatacttacatatattctgtctccttaagcattgcagaggctgagagaatttggagttgcctaattatttttggcatggcataatttatagttttataatagcacaattcatcttataattctgtgctactgttcttgggaatgtttagacaacagtcacatatatttatttctttatcttcactcagagtacaagatagctccacttaagccatttctggcaatatagttatttttctaccggtaacttaaaggctaatttgttatatttcagtgggtagttactgcccattttgataaggagtttaatagcaggaaaacagtttgcttgttccttcagattccaatactttcttatgaagagggacaagtggtttttttccaaatgtttgaagtctatctatactgaacttttttaaagtttcaggttaatttgatcaggatttaatgatcttatacatgtattatttatattttaggaagacctttgagtttttcctttggttttaagctgcagactatggttgagggcagcagtgtggtattctggcatttgatgggaatgaggagacctacaggccagtgatacactgaagggtctgagtaacatgctcatgactgtgaagcagtgcatagggaatattagacctgatcctgctcccttcagcttagaataactccaaatcatgattcctcccgaatctctttgcctagcaagctataaatgaattcacatatgatatatcagatatataatctttggaaatactttcatttatttacttaaattttttgaaatagagtcttactctgtcgcctaggctggagtgcagtggcgcaatctgggctcactgcaacttctgcctcccaggttcgagcgattctcctgcctcagccttccgaatagctgggattacaggtgtgcaccaccacacctggctaatttttgtatttttagtagagacagggtttcactatgttgaccaggcaggtcttgaactcctgacttcaggtgatccacctgccttggcctcccagagtgctgggattacaggcatgagccatcacacctggccttggaaatacttccagattagaaactatagaagagaaggagttcaactgtctaatcttctccagtagcaacttttaactgtgagatgtgagagggatatgattccctgggggaattttcaaacttcacatatcactcctactcctcccactcttgtaggctttctgggctgggggcttgggacatgaatctgtcttgagagtccctgccataacaaaccacagttactcctactcataggtgtttgtcgtccttcagatgagaaggggcaaggagaaaaagtgagagccactgacatagcaagtgtagctccctcttttcaagagtctcaatttgggaaacatacacaggggtcttccctcggaatcaccagcagagcttgtccctataacccttaatcagaagatggggctttctaccagcaagcagttcatagaggactcatgtgcctctggtcaggtgcagcagtgatagatggtattggacctacacgattctcaatgtcatttttccaggaatgtgtagtaataatagtggacagggctgctgtgctacctgactgctgagttagtattcatggccaaaaggaaaacctgccagagagtgtctccttggtgttctccggaatcattgctatgtgggaaagaaaatagagtagagaacgtcacgctaacatggctgtcatgatagcagcattggggataaagtgagcttttgatttctcccgtcttactcccttcatgtgttgtgtttgtgtgtgtgttttaattaaaaggagcaggtctttcaagtgtgcctggttggagtgaggcttgttttagatttgctttctctaatcaaacaaacttacgctttctttctcctggttttagcatagcaaacatggaaaatctcgccccaggcagattcctttatagctagttgacccaagttgtgctcttatttatttatttttgatgacacatcttgattaaaggtttccaattcacctttcagctcttcatggaaccagccaggagagagaactggtcagctgctaatcaccaaatgaactccctgatctggcctagggaacagtgggattcacaggcatgggtgacttagaaaaccgggcccagcagaaatgaatctctagtctctttgctgagaaggcttgaccaaacacagttttattggtcagtggctcctgctttagtaacctttcaccccaatggctcttggaggtgcaagccactggccggccttgcctttgaactcctcatggctcctgccacctcaaaggctcccagtcagaggcttgtgttttgctagggacctcacctcacagcagggtttcagcagttgggaaaaccgatccacccttagaacattgacatatttgaaggtgatacccctgagacttgaaacctagggctttctatttcaggagctgtctgtcacatgccaagaaacatgactcaggcttccccttttcccttcttgaccccttcttgtttcctggaggacaggaggtcataacatgggagcgttccctcagagtattcatgaagtcctctcttactgtcaagctctttcaccccttattcttctaacgttccccaagtagcatttattttgaaagtttttttttaatagggcaaaagcatgcaaatcacaagcatctttggtgtctgggaacatagtggtgaagatggtgtagtggaagtgtcatgaggctgtgtgttcagtcctaaagcattcagatcacagaagtcctagttgtgagagagcccggctgtagttttctttgccttcttgattccattccatcttcagaaaaaaactagatcttgcaagaagacatagaaatagcatggattgtcctcccgcatctgcttgggttcttgcctgaggagcagaagtgaaaactgttggtatttagaagcaaatccagggagctgtcgatattagatgacttcagtatagcttctttggcaagaaatcaaacatctcattctaaaaacattgagtagaaaatgcctcttttactcatgatgcctttagcatagaaaaggagcaaataatatccattgaagtctttgcttttctacaattcaaatagaatattattgatgatattataatactacttttagcagaaaggacaaaggtctctttctgccttagagcaaagtttaagttttcagaagagttatcagaagagttaggcctgtttctaccattgtcttgttctatggtcatgggtattttcatgagtaggatcatgagctcacatttcacaagttgcaaagggaagggccaaattaacatttgtgttaactactgtgtctggtactgtactgggagcttcctcatgaaaacttgatgaggtagctattattcttatttttataaaggaggaaaatgaactttagaggctgagtagatggcctgaggttataaaacttaagtgacagattcaagattgggaagaattttggcatatgactaaaaactatgaactttatttataaagctctcttttgtccttgtttagagtactcttgaactattataatcatctaaaatatttgtaaaatgcctactttgggtaatatactatacacaattcagagctgtacaagccatggttcttgttctcaagtggccaacatttttgaaggaagaggtatgtgatgtccattagtgtctatattagtttgctagagctgccataacaaaataccacagacggggtggcttaaacaacagaaatctatttctcacagttctggaggctggaagcccaagatcaacgagttggcagggagggtttcttctgaggcttctctgcttgtctcgcagatggctgccctcttgcctcctcttcacgtgtcgtccctctgtattcacgcacctctggtgtcactctgtgtgtccaaattcctcttctttaaggacaccagattggatcagggcccaccctaacagcctcattttcacttaatcacctctttgaaaaggccctttctctaaatacagttacattttgagatgctaggggtgagggtgtcaacatgtgaatttggggtagacaattcagctcagccccaggtctgtataaagtataagactcaaagtcagtagctgtcatttagtggctcagttgagaaagggttttgcttctgactggagtgcacctctgtggtgttttctcctaactccattctcaacaccttatcaagtataagcagtagtcatggtgtaaggccagacgggataggagccagtgaagaggggcgctttcactaccacctcattccgttgcaagttgaaacactgagaaccggcctgttgggctcaactcagaatttgtgaggcgactctgccctggatacctcatccacaaggtgggacttctactcatggttccctaatcaccacagggtaagttagattcttaaagtagtttattaagcctaataaatgctcagttttgttttgttttgtggtatcaatggaaagattcttggagaagacttttttcttcattgaaattttgcatatcacagtttatgttttaattccagaaggggaaggttgaaggttcaggattctacactagattgagagctttggtcctttaacaaatgcttgagaattttaaaaagatttaataatacagaaaacctcttataataaaagcaattcttcattcttacgcttacatcactcaagatggttgatttgggggatggggaggacagaaggtggcagaggaaacagatttatgaaagtaacatatctctacccctaaagagagattgttaatttatccttgtaacattgcatgcctgccttttgttgcctcacctagatgcatcagctagatcaacccgccccagcacatacttgtacaccctagctctctgaatcagccaggttgatggagtgttaatgtggtagtaaactgtaataaagaagaaatcttttcagcaattttttaaaaaccttttttaaaattatagaattgtagtctccttggcccagataaagtcatggccttccctacctcatttgtgtttttcagagcattggattctccttgactagtaggcagggcacaaagtgtttagaagattaaggagacactatcttacagaagataaactcagaagcctgagtaaataaatttcttctaatgttttccctattgattcattgattcactagtaaagcagagtttactaataacacacttctttaatagcaagccatattatatgcattaattattaatgggctaggcctgggcaggaagatacctggttttttgttgttgttgttttgagacagagtcctgctctgtcacccaggttggagtgcagtggcgtgatctctgctcactgcaagctccgcctcccgggttcacgccattctcctgcctcagcctcccgtgtagctgggactacaggcgcctgccaccacccccagctaatttttttttttttaattgagcattttcccccttgtactccacattgtctttttttttttttttgtagcaaatttgttgacataattgggacatttaacattctatatttttggacctgagagaggaggtttatttttatccagcagcaagctactattttaggtgctgtgggatcctccctatattcaaggaagtaactctcaagggaattgtgagctgagcatcacgcttggagcaaggcacgttggagtactaatagtggcatgagaggtagtgggacggccagcagtcatgtgcatctgtttccctcctgtccttttcaagattcttagtgcatgactttggatgagttatttagctttaaatgtctccatttcatcatctgtttgtttttatattctctagtaaggactaactcccaactgtgttacaataaaagaaatcaaggtagaaagagatcaggagtgaatgtgggtactatgttacctagacaactactccctaaatgttgttgaggaaacttcttggttattgttattctaaggagggtcttccaacatcactcaagatggacacataacagtccttgccactgtgttgggtcagaggttaaatttctctcttaaattagccaagagcacataggactgtggctgagaaagggagacttctggaaaagttgaactttatggagcattaggagtcttgaagtcactgattgattcctttaggaatctgtgcagcaccatagcccagcacatgctccagtgttacccaaggtaaatcaggaagtctagaaaaaagcaggaccagtaaacccccatgaacctgtcagtggctcaattttctcatcataaaatagggataattgggttgtgaggattaaataaattaatacaggtaaaatacttaaaatagcgcccaatacataataactgcctaatttaatcaacagatatttattgagcacctgctttgttcgggtatagttctgagtgctatagatgccacagttaacagacacaaatctctgcctgcttggaagctacattcctctggtgggaacaggtgttagatgatgctgatagtgatgatggtgagcatcgtcattatctgaggtcacagatgttggaagcagaatgaactgtgagcattaagttcacttttcaccctttctccaggggtatttgtcttttacactgaggtaaatacatttttttgggaaattcctgtgttgaagattgtttctaggttgcttgtcctgcctttttgtaatgttttccttctaattgcaagtttacttgtcttattccaaactccatggcatgacttagagaaagaaaagagtttggggttgggtgcagtagctcaggcctgtaatcccagcactttgggaggtggaggcaacaggatcacttgggcccaggagctcaaaaccagcctgggcaacacagcaaggccccatctctacagaaaatgaaaaacttagctgggtgtggtggtgcatgcctgtagtctcagctactcgagaggctgaggtgggaagattgcttgaacctgggagatgtaggctgtagtgatctgtgatcatgccactgcacttcaggcagggtgacagagcaagactctgtcttaaaaacagttggagtttggaatccccatttttcatttgcctctctttgtcccatgttctatttcttttttctgtatcctttctctgatgataactaggtttttaaactctttataggaatcaaccatgtaatccaatgccatataagcttgtaaagagcttgtaaatacgtattggaccttgaaaataaaaccttgtctaaaaactcttgtgaacttacatgagtacactattttgatatcagaaagtattgtcctggacttcatcatttagacctcttccctacatttttgtcattaacgaatatatgctttagccattttctctggtggaacttaactgcatgttaattctttaattaccccccacaaatataaatactgagactggagatgaaaggaagtaatatgcttcgaaatggatgacatgtgcttatatatgggcctttgggaatgttccaggccactgtgtttgagattaggatttgagtgctggtccatgtattttcttgtttttctaacctttgagtgactcatagttttggatgtaataatagatttagaactccccaaaattaaactacacaaagaggaaattgttgtatattcaactttttatatgtggatggggctgctgctgatgttgagagttcttcagaaattctttggaacatgctagggaaacatggcctggaagattgtgtagagccttttttttcctcagcaccagggaaatgggattaaactggaggaggttaagagatggttaacaaaaatgctaggagtggagaaagttagatttaaacaagcaagatctttgcagctaaccaaggggtaaggtcatgagcaagttgtcaaaatcctgagaagggcgagagagagagaaataaggtccatttagtatggcacagagtttcataattgtgtttgttaatattaaaactttttttttccttttcactacatatgtgccaactgggtggagactatttttaagaagacaaaaccacaataatgaacaacccatcgtggattctacattcttacatatttttagaaggatggaaatgtgggataaggtaaaaagaaaattgagattaaatcctaggagaaattaattcctagcaagaattattgggctgtataggagatcctgggaagaaagcaatatgtgttcactaaggtgtgatacactagatcttgcactgggcagtggctacatttaaaatggttctcagctgttcctctggaacaacacagcttaaaatagagtctctactagtcaaagcacgtgtagtcttgccttactgttgctgagaaaattgtgatgttaaggatggagttctctctccttaatccatttataattttgggggacacatgggccttactctagaggaaattcaggatcctagtataaagaagctgtaagaatccacagacctattatacaacagctgtagtatttatgggctggtttcttgagtccttgcccataggtgaggactagtaaattttgcttaacattgtgtgccaaccatcagagagtttttgatctgtctgggaagataagcttttcccccgtagaattacaatggggcagaaaatagatgctgattgttttgaaaaattgtcagatgaattagaaaagaattaaggctagtttcaaggaagagatgaacattaaagtacagataggattttttaaattaataaactttagatttttaggagagttttaggttcacagcaaaattgagcagaaactacaaagagttcccatatatcccccatcctcatagttgtccaacataccccactatttactgaacaccatagtggtacatttcttacagttcatgaatctacactggcacatcattatcacatgaagtccataatttacattagggttcactcttgatattttacattgtatgggtttggacaaacatgtatctaccattgtaatatacagaatagttccattgccctaaaaatcctctgtgctctgcctattaattgctcccttctcccaactctcggaaaccattgatctttttactgtctctgtggttttgcctttttttgaagtcatatagttgaaattatatagtatgtagccccttcagtttggcttcttttacttagtaatatgcatttaagtttcctccatgtgtcttcatggcttggtagctcatttcttttcagtgctaaataatattccattgtctggatgtaccacagtttattcacctactgaagggcatcttgattccttctatgttttgtatatgaataaagctgctgtaaacatctgtgtgcaggttttcgagtagatgtaagttttcagtgcatttgggtaaccttcagggagcacagttgctggcttgcatggcaagaatacgtttagttttgtaggaacctaccaaactatcttccaaagtggctgtaccactttgctttcccacctggaatgaatgacagttcctgttgccctacatcttcaccaacatttggtgttctcagtgctttggattttggccattctaatagatatgtatttgtatcttattgctgttttaatttataattccttaatgatatgtgatattgaacatcttttcatatgcttacttgccatctatgtatgttctttggtaaggtgtctgttcaggtcttttgccattttttaatctgattgttcactttcttattgtagagttttacgagtattttgtttattttggagaacagtcccttattagtcgtgtcctttgcaaatgttttctcccagcctgtggcttattttctcattctcttgacattatttgttgcacatcaggagtgtttaatattaatgaagtccagcttatctattatttatttcatgggttatatctttggtattgtacctaaaaagtcattgccataccaaggccatctaggttttctcctaagttatcatctaggagttttatagggttgttgttgttgttgttgttgtttttgagacagtatcatttcatcacccaggctggagtgcagtggtgtgttctcagctcactgcagcctcctccttctgggttcaagcagttctcatgcctcagcttcccaagtagctgggactacaggtgcacaccaccacacccggctaatctttgtatttttagtagagacgggttttcatcatgttggccaggctggtcttgaactcctgacctcaggtgatctgccctcctcgccttcccaaagtgctgagattacgggcatgagccactgcaccctgctggagtttataattttacattttatatttaggtcagtgatccattgtgagtaaattttttttgaaggatgtaaaatctgtctagatttttttgtatgtagatgtccagttgtttcagcaccatttgtggaaagactgtcttttcttcatatgtattgtttttgctcctttgtcaaagatcattcaggtatatttatgtaggtctgtgtctgggctctctattctgttccgttgatctgtctattctttcaccaatatcacactgtcttgatgactgtagctttattttaagttttggagtttggtagtctcagtcttctgactttgttcttcaatattgagttgcctattctggatctttacctctctatacaaatttagaatcagtttgttgatagccacaaaataacttgctgagatttttactgaaattttgttgaatctataattcaagttgggaagaaccgacatcttgacaatattgagtcctcccagctaggaatatagaatagctctccatttatttaagttatttgatatctttcatcagagttttatatttttactcttatagatcttatacatattttgttagatttatacttatttcattgttttcagtgctaatgtaaatggtgatgggttttaaatttcaaattccacttattcattgctagtgtatatgaaagggattgatttttgtatattaaacttatatcctgccatcttgcagtaactgcttattagttccattttgttgttgttgttgattttgttggattctctatataaacaatcatgttatctgtgaacaaagacagttttatttcttttttcccaatatatataccttgtattttttttttcttgacttactgcattggctaggactttcagtatggtgttgaaaaggagtgtgagaggggacatctttgccttgttgctggtctgagtagaaaagctttgaatttttcatcattatgatataagcagtaggtttttttgtagatattctttatcaactagaggaaatttccttctattcctagtttgctgagagtttttatcatgaataagtattggatttggtcaaaggctttttctgtatctattggtgtgctcttggatttttttctctttagcttgttgatgtggtggattacattaattgatctgtgaaagctgaaccagccttgcatacctgggataaatctcacttgatcatggtgtttaattctttttacacaatgttggatttgaatactggttgttgttgtttttttttagaattttttgcttctattttcatgagagatattggtctgtagttttctgttttttttttaattaaaaaattttatgggtacatagtaggtatatatatttatagggtacctgagataattttgatacaggcatacaatgggtaattatcacattagggaaaattgggtatctatcccctcaagcatttatcatttctttgtgttacagacgttccaactatagtcttttagtcattttgagatgtacaataaattattgttgactatagtcactctgttgcactatcaaatactatatcttatttattctatctaactatatttttgtacccattaaccatccctacttaccactccccacccttcccagcctctggtgatcatcattctaccttctatctctttgagttcagttgttttaatttttagctcctacaaatgagtgagaacatgccaaagttgtctttctgcacctggcttatttcacttaacataatgacctccatttccatccatgttgcaaatgacaggatctcattctttttaacaattgagtagttctccattgtgtataagtaccacattttctttattcattcatttgttgatggacacttaggttgcttccaaatcttggctgttgtgaatagtgctattataagcatgggagtatagatacctcttcgatatactgatttcctttcttttgatatatatacctagcattgggattgctggatcatagtttagttctatttttagttttttgaggagcctctgtactgttctccatagatgctgtacctgtttacattcccaccaacactgtatgagggttccattttctctacatcctcaccagcattcattattgcctgtcttttggttaaaagccattttaactaggaggagatgatatcttattagagttttgatttgcatttctctaatgatcaatgatgttgagcaccttttcaggtcttgtaacaacatgacttaattttgcccatttttaaattagattttttttttgctattaagttgtttgagctccttatatattctggttattaatcccttgtcagatggattgtttgcagatattttctcccattcttttggttgtctcttcattttgttgattgtttcctttgctatgcagaagctttttaactctgtgatcccatttgcccatttgattgcctgtgctttgggggtattactcaagaaatctttgcctagaccaatgtcctggacagtttccctagtgttttctttgaatagtttcatggtttgagatcttagtctaagtctttaatccattttgatttgatttttgtacatggtgagagataggtacctagtttccttcttcttcattccgtgttattgataagttaaggacttattcctgccattttgttatttgtttcctggttcttttgtgatcttcttatttttccttgcttctgtcctgtcttcctttttgtgaaggtgattttctctggtagtatgatttaatttcttgctttctatttttttgtgtgtatctgttgcaggattttttttatagtttaaggttaccatgaggcttacaaataacattttataatccattattttaaactgatgacaacttaacactgattgcaaaaacaagctaacaagcaaagagaaaactaatgaaaacttacacttcaacttcactcctccctaccttttaacattttgtttttatttatattttatgatactgcctatgtcttgaaaagttgttgtagctatttttgttaggttcatcttttaatctttctacccaagatatgaatagtttacacaccataattacagtgttataatattctgtgtgtgtctgtggacttgctattaccggtgggttttgtaccttcagacgatttcttattgcttgttaacatccttttctttcggattgaataactctttagtatttcttataagacaggtctagtgttgatgaaatccctcagcctttgtttgtccgggaaagtattcctcctttatgtttgaagaacatttttgccagatatactctaaaagcttttttccttcagcacttcaaatatgtcatgtcactttcttctagcctgtaaggtttccactgaaaagtctgctgccagatgtatttgagctcctttatatgttatttgtttcttttctcttgctgcttttaggatccttccttttttcttgacctttggaagtgtgattattaaatgacttgagatagtcttctttggggttcaatctgcttggtgttctataaccttctaatacttgaatattgatatcttgctgcaggtttggaaagttctctattattatccctttgaataaactttctacctcaatctctctttccacctcttctttaaggccaataactcttagattcgcccttttgaagctactttatagatcttgtaggcatgcttcattctttcttattctgttttcttttgtctcctctctctatgttttcaagctcactaattctttcttttgcttgataaattctgctgttgagagattgatgtattcttcagtttgtgaatggaaatttttagctccagaatttctgcttgattttcaaaaattatttcaatctcctttgttaaatttatctgttagaattctgaattccttctctctgttgtcttgaatttcctcaagcttcctcaaaagagctaatttgaattctctgtctgaaaggtcacatgtctctgtcactccaggattggtcactgatgacttatttagttcatttggctaggtcatgttttcctgaatgttcttgatgcttgtggatgtttgtcaatgtctaggcattgaagagttaggtatttattgtagtctctgcagtctgggcttgtttgtacccatccttcttaggaaggctttctacgtattcaaaggaaattgagtgttgtgatctaaatcttggtcactgcagccgttctgcattgggggcagcactccaagcccagtactgtgagtcttatggactcacgaaggtacagccttggtggtcacggataagatctggaagaattcgctgggtactaggcaaagtctcttgttctcttttcttactttctccctaacaaatggagtctctgtctctgtgatgagctgcctagaactggggaatgggtgacacaggcagtcctgtggtcaccgctgcttggactgtgctggatcagatccaaagtgagcacagcactggatctttcccagggcctgcagtgaccgctgcctggctgcttctgatgttcacttaggctccaggggctcttcagtcagcaggtggcaaatccattctggcttatgtcctctgcaggacagcaggcctcacccctggcccaagtcatgaccagaaatgccatctgggagccagggcttggagttgggaaccttaggaatctacttggttctctattctacgtggctgagctggcatccaagctgcaagtccttcccacttttccctctcctttccacatgtagaagaagtctctcttcatggccaccactgcccttggcccatggcaagtacagcctggccactggctgatgttcagtcaaggctcaagggctcttcagtcggcttgtggtgaatgctctcaggcctgggtcgctcccttcggggcagcagtctcccctctggcccagggtgagtctagaaacgccatccaggaaccaaggcctgggataagaccccaaagtctacttggtactctaccctgctatggccaagctggtccccaaactgcaaaacaaagcccccttttctctctccttcccctgagcaggaggagtctctcccagtggccaccacagctgtgaatgtgctgggtcatacctgaagccagcacagccataagtcttacccagggcccacagtgagaactgcctgtgtaccactgatgtttattcagggcccagtgctcttaaggcagcagactgaatcctaccagcactgggcccttctcttcaagggagcaagtttccttctggcccagtgtgtgtctagaactagggcctggaatgagggtttcaggactctgcctgctgccctattctgctgtggttgagctagtatccaagttggaagatgaagtcctctttattgttccctctcctctcctcaagtggaaggaaaaggtctttcctggagctgtgagctgcactgcctgaggttgggggagcagtgacacaagcacccactttactgtaccagcagctggtgtatatatgtaggccacatgcaccccgagtctgctggttctgagcccagacttgcccaggaattgccatccttgtggcctggactgcctttcaagtttatttaggaccccagagtactttagccattaacccaatacattgttgctgtgatcatctggaacaaactgttattttttctgtaaatgggatggcaaagcctggatgacagcgtatcagtttatagcatggtttatgaatattttaagcccactatcgagacctgctgctcaaagaaagattccttccaaaatagtaagaattgaaaatttttaatttttaataaattaatttaattttaattaaattaattaattttaataaattgatttttattaaaaattaataaattgattttaataatatttaaattaatttaattttaataaaaagaaagaattttatttgacctttgctttttctctaatgctctttctttccttatgtagatctgaattcctgacctatatcattttccttctctctgaagaacatttaacatttcttgcaaggcaaggctactgacaaatttcctcaattttttttctgagaaaatctttatttctccttcacttgggggataattttgcagggtacagaattcttaagtgtgtggtttttttctctcaacactttaaatatttcactccacttccttctattgcatggtttttaggagaagtcagatgaaattcttatccttgctcctctgtaggtaaggtgttttcccctacccctggcatctatagagattttttttctttatgtttgattttctgaagtttgcataccatatgctaggtgtggtttttgggttttttgggttttcttttcttaacatttttagggtttttgctttcgttctttttttttttttcttcatttattctgtttattgttctctgagcttcctggatctgtagtttggtatcttgatattattttggtaaaatcctcagtcattattgcttcagatattgcttctgttcttttctctgtttcttctcttctggtattttcattacatgtatttatatcttttgtagttgttctacagttgttggagatcctgttttgttttcttcagtctttttttttctgtgcttttcaggtttggaagttactgttaaaatatcctcaagttcagagattatttcctcagttatatccagtttaataattagcccatcttcattttcattacagtgtgtttgatctctatcatttcttttttattctttcttagaattttcatctctctgtttacattattcatctgttcttgcatgttgtctgccttttccattagaacctttagcatattaatcataattgttttaaatttctggtctggtaatttcagcatctctgccatgtctcattctggtttgatgcttactcagtctcttcaaactgtgtttttgcttttcaatatgccttgtaattttttgttgaagtactgggtgaaaggaactctgggaaataggccttcaatggtatggtggtattgtgtggggggaaggactggactgtgaacttcacaaatgcttctcagtttttccccaaccttgcttaggtgggacaggatggctacaggggactagagttgggtatttcctcacttttatgtggaaggttagagccagctggagttggttatttcctttcttgcaaataggataggctctgataaaaccctaacaggttaggctcttgtaaaatagtttctcctcagggcaaatcttgttaagaacaaaatgctctggtatatttcagaatggttactttcccttcccctttctagaagcaccaaggggttgttctctagtattctctgtgagaacctggttgaacaaattctggtggtaaaactctggaagtgtggggatgcccccatctctctccctgactgggtttccctggagtttttaaactctcagacttgtccacactgagcctccagcaatttgtcaattacagttaaggttttcctaccctggcactggttcctggagaggtttgtgctccagtaagttgtgattctctctattcacctgcccatctgttcagtttccaaggcagctgtttgtgatgtgacctcatttgcttgataaattggagaaaaggtgttgatttcatttcagccttttacttgtgttaggacagaatggtgacttctaagcttattaagtgccatactggaaaccagaaacccccagacaggattttagtagatggaagaacatgaagatggcattccagaaaaagggaataccatgaacaaagtaatgatcatgtgtttgtgggccagtggagaaagtgacttgcctagactagcagaagcatggtgaaaatagtgggtgagaagtttagatatgttaagtgcaacggattttgaaggatattgaatggattttggatgaagaataatctggactgtgagaagctggggtaatgggaagagctctgctactgattgtgtgtgtgtaaactctcatggggtattgctgggatataagggtctgggtatttgttttagttatttacttaacaaattattttgtagctggctaatttactgaacttgcttattagttctgataggtttttagctgattctttagggtttccttcttagccaatctatggaaagctcttggatttattttcacatttgtatcctttttctgttttcttattcattaattacttctactgatcttcttggatttgtttcattttccacattaagttggatgcttactttatttttgtatgataatttggcatatacatcaaaataaaattaaagtgtgggactagaagcagttggaattttggaaatatctgaagtctcagtagatttcatctctaagattttaaatataaaaagtggctatatacttttaaataggtgagatatgttagcaggcttcaacttaacatttaaggcaaatgtcagattttttattgctgtgaacttattactgaggaaagaaaacatttaaatatttttctccagccacaaatccccataagtttaaagattttgacagaatgccatactttatgtatgttaaaaaattgtaagccaggatcaatggcatgcacctctagccacagctgctcaggaggccaagacaggaggttcacctgagcctgggagtttgaagctgtagtgtgcaatgatcgtgcctgtgaatagctactatactccagtctgggcaatggagcaagaccctggctcttaaaaaaaaaaaagtaatattcagtgaatacaatttcatagtttttaatcctttcaaagtacattaaaaatagtgtgctaaattctttgatacttcttcctccaggaggtgaagcttcattactctccctttcagtatggactgaacatagtgacttgcttctagggagcatagactatgggatgggaacagtagtaatttagcagtgggaaaacctggcagacctcaccttaactatgtgagcaaggttaacgttacttttaataagtcatattggtagcatatgtcccctgatggagtgtgaagggaagggtacatcatctctgtagtattctccaaaatctataacctcaatctaataagtagaaaacatcggataaacccaaattgagggacattctatatgaaagtcctgaccagtactgtcaactatgtcaatgtcatgaaagacaaggaaagactgagaaactgtccctgattagaggagactgagctgacatgacaagtaaatgcactatggtgtcctggattagatcctggaacagaaaaaggactttaggagaaaactgggaatctggagaagaaaaaaagtatgttgtttagttaatagaattgtaccaatgttaacctcttggttttgataattgtaccatggtgatgtaagatgttaacattaggagaagctggatgaggggcattccagatatttgagaactctctggctactattgcaactgttcactaagtctaaaagtattacaaaataaaaagttataaaagcaattaccagctgggctcagtggctcatgcctgtaatcccaggactttggggggccgaggcaggcaggtcacctgaggtcaggtgttcaagaccagcctgaccaacatggcaaaactgcatctctactaaaaatacaaaaattagccaggcatggtggcagacgtctgtaatcccagctactcgggaggctgaggtaggagaatcgcttgaacccagtaggctgaggttgcagtgagccgagatcgcaccactgccctccagcctgggggacagggtgagactccatctcaaaaaaaaaaaaaaaaaaaaagcagttaccactttgcatagcaaagcaatagacaaatactgaaacctaccaaaaacttataaaatgaattctgctgcagttaggtgaaccattgtgtgtggctttctataaactttcagcaagtgccatatgggtgggttcctaaattactgtctttatgtaactgataggtgaagatggtggggctgggaaaatgtactggattaatagaaacatgtttccaggagttgcatgtggagaaggcaaataaaacagcttcatgaataaggaagtgaaaaaaagccgtctcatgttttatgcggcaaggtgttttacatacaactaaattaacaaaataaatattttaagtaaagaaaatgattagtatgtggataaatcccaggtatattaacctttttgcttcaaaatccctttttatgttaaagaaagtaagttctattaattgctgtttgttggatccccaagttaaagggatatcagatatttgtgaacttcctctgctcttctggagaaactggtaacatgggcatagtaaatgtcttcaaaaacctccagtccacaagaagtgcctttaaagggttttgctgatatttttttccctcgaattttaagttagttgtcaggtaactcttatatttatgaaaatggagtatgtaaaagaataaacaaaaaaatcttgcttacagtaattctaaactaaaagtaaggatgcttgggttataatttggccttattattgagctttttgagctgtcagatgaagattattagagcctatctctgggaccttcagactgttatgaggttgtccaagaaggacaccagactccctgctcttgtgctgtcaaaaggaccagtgagcaccaaagagcctgttggacacagggctttggaaagttgggaatgctcgttgctactattttgttaaagccaacaaatgaaaaggaataattagcctttggcatatgtatttggaaaggcttagaatctctttggaagttttcaggcttatcttcagacacagctttgaaaaataaatccgtgatgcatggaaatattttccagctgttcacctgaaataaatggttctgtcaatgttagtgtgttaagagtaagtttcctgtagctcggatctcttgaatctcctcatttgctaagagggagaagatttgcctttttaacagtgcagctgtttcttaaacttcttgagggagcaagtgaatgctttatttaatctgtcttggttctcttgggttttggggtctgtgttttgctgttttctcattaattttggaaaattcttagctctttttcctttaaatacatctgctgccttgttctccacttccccctctctcctcttctgagactatagttacactatattagagtgtttgatatcgtcctacagttctagagtactctgttttagatttttccctcccactcttttttctttttgtgtttcagtttggataatttctattgttctgtcttcaagctctctctttcttttcttggctctgtctagtgtgctaagactgtcaaaggaattcttcatctataatactggtttttcacttctagcatttttatttgactgttttttatattatccatctttctaccaaaaattcccatatgttcctgcgagttgtccacctttttcactagatcctttaatatattaattatagttaaagtccttgtctaatagttccttcatcttggtcatctttgagttaggttctgttgacagctttattttatgtcagtgggctgttttctcttatttcaaaaaactgagaggttaagtaacttaaaattgctcaagatgctctataactgttgttctttccactatgccacactggcttctcttaaatacttattattgctaatcccattgcctttgcattactgaaaattaagaaattaatcacatttaatttatgtataaactgagatagcagtttcaatttggagttccattttgcccatgatggttttaagctggcccagtccctgccctagagaagctttataattctcatgtttgaaaatatcctaggaattatatagttcttatgctgtgaaatctgtgtgttttataaacaaaatcactgtggaatctgattaaccaagaaagtttaaatgctttgttcaaggttatattggtgtgacctattcacctgtaacctaactcttcaactgtgtaccttccacagtttagagtgactggggaatttgcatagctgctgaagaatctctcattcacacttttttttttttttttttttgagacggagtctcgctctgtcgcccaggctggagtgcagtggcgggatctcggctcactgcaagctccgcctcccgggttcacgccattctcctgcctcagcctcccaagtagctgggactacaggcgcccgccaccacgcccggctaattttttgtatttttagtagagacggggtttcaccgttttagccgggatggtctcgatctcctgacctcgtgatccgcccgcctcggcctcccaaagtgctgggattacaggcgtgagccaccgcgcccggcccacacttttaagatagatataaatgtggaccatgttttaggggagaaaaagccataataagcacttatttgcatttgctctctggatgagaatagtggtgctttcgtacattgccagcgtagctgaagactccttcctctctgtggacaagcaggctatactaagccctggaggggctataaattataataccttctgaacatttcaaggtattacagaagacctgcagaaacaattaagcctgagaagttcacttatccccaggctgaggcacttgagctatgattattggcaaaacttgcttcctttctgagtgaattgcaatttggtggacagggtgagatgatttgagacatcttaaattagaagttcagttgtgcatttgtgcctttggctggtgtcctgggtggatttcttaccaattattgttttctataaatcccaaaagctgccgtctccactgtgattatatgtgagcataaggctttggaatgcttaagttggaatgtggtttaatttgaatatgacttaaaagaatatatgatgatagacccagttgggtagaaaaggagataaatattcaggatatatatgtgtttatgtttggcctgatgctttgtaaatttttacacctttcagtttcttgaaaaagggtgattttctaaaacttgctatgtgctggtgctcttaatgctctggaatggggtagaaaaaaggtctgaatttagttaggagtcatggatttggattgtgattctgctccttaatatctttgtatcttagtttcctcatttataaaatgaaactgtcccaaataagtgacaagctggttgtgaagagcagatgaaataatgaatataaaagtgctctgcagcaggtagaacactaacatttgcaaggatgctgatttttaaaataccagtatctatttccaaggaactcacagtctagctggagagaaaaaagtaatcctctgaaacaacagaaaaacaattatagaacagtatataacaactaatgtgtatggcaaaggctgtaagggctaagggatttcatagtaaggggagattggtgataacagaaagtgatcagtaaaggtttcatagggaagatgggttatttcaggtctcataaaatgtaaacattttggctggatgataggagagaaagcagtaacatgaatttaagcaggattgagattgtagtgaatagggcatatctaagaagcagtagcagggaggcagccagctgtgtacccagatgaccaacttctggacaacttgagaaagtcagatacccttgaaagctaaatctgtatttcagcttttctttgagtaggagacattctcattgtgcatgctttgctttcttcttattagttagtggagatgatattagttacataactcaagttaccctaggcttttaactcatggatagaacacttgcccaggaaacagaagcagagtaagcacatctagactagaaagtatctttttccttcacccttttgggttactttacaatttccccatgttaaattttcacatgttcactcccttgcataaatccaaatagcctctggttttgagtggaatcatagatctgaatgaagctggagagatcatatagactagcatcctgcttttgttaggaactgagtttaacttctgctcggataagaaactgccttctttcaaaagactatattggaccaggaaagaatagctgatactggagcaaccctcctgccaaaagaagaaaaaattataaaagtttatttaaaacaactgcttacaggcattgtagaaccactaacacagtatttgagggaataccattcctgagaggaagaaagcacttggaattgagctacatagtcactctggcatcttctctgacggtacttgccaattctctatccaagagtatggggtcccagcagaaagcagcagtcctacaggacttagaggttggagttagggcctattaaagtatttgggatctgaaacacaaaatcccaggagaaagaaaaccacaaggaagaaagtgaaaaatgtgctcgtaatcttcccttagagtgtttgccaactcctaaggtacacatgatcagagcaagactccaagaatcctagtaaaaagcagcagttgggaatgtagtgagcaatgcagatatttcagcagccatatacagtgctggtgagaggttggtattcaaggcctgccaaggtagaggggccctggcaaatacaaataacccaggctttaattggaggcctcagaaagaccacactttaagcataagggaaagctgaaataagctagccctgacatagggctctgacaggacctctgacaggattaaagtggcctgactgtactcttacacctgccaaaagaataagttacagtcttaggaggaagataatctgaatcatccagaacctctacaggttttaaacagaatgtctgccatccaataaaaaattaagaagtgtgctaaaattgagaccaaatgaccaaaatgaagagaaaaacgacagtagaaagatatctacaggtgactcagatattggagtttatcagtcaaaaactgattatgttcaagaaagtagaagaaaagaaggagactttcttttttttattattattatactttaagttttagggtacatgtgcacagtgtgcaggttagttacatatgtatacgtgtgccatgctggtgcgctgcacccactaactcgtcctctagcattaggtatatctcccaatgctatccctcccccctccccactcccccgaccccacaacagtccccagagtgtgatgttccccttccttagtccaagtgttctcgtagttcaattcccacctatgagtgagaatatgcggtgtttggtttttttttcttgcgatagtttactgagaatgatggtttccagtttcaacaaagatatgaaatctacttttgacaagatcaaatggaaattctggaactgaaaaatataggaatgaaattaagaatttaatacatgggtttaatagcagtttaaacaccaaagaaaaagggctagaagattattgaaccagaagaaaagttagtagaaaacacccagattgaagcacagagagaaaaaatactgaaaagagaataagagatacatgagatatattgaaaacattatgaaatatatttcacatatatttatatttggagtctcagaagaggagagtgcaacagaaataatatttaagaaatattgtccgaaagttttctaaaatcagtggaaagcatcaaaccacaaattgaagaagcgctacaatcctcagtgggataaatacaaagggccacacctaggcatgtcatagttgaattactgtaagccaaagacagagaaagcttaaatgcagtcagaaataaaaagcatattgtcttcaaaggtgcaccagtaagattgtcagctgatttattaatgaaaaattggatgaagccagaacacagtagaagtatatcttgaatgttctgaaagaaaattgctaacctagaattctctacctatcaaaagtatccttcaaaaattatttgggtaaaaagaagctttcaaacaaataaaagagtcacccacgaattctacagtgaaataaataacaaaataaattcttcaattagcaggaagatgatatgtgatggaagttcagatatgcattaagaaaagaaagggtaaatatacggtgaaaatttactttaaaaaataatgatgtccccagacgcggtggctcttgcttgtaatcccagcactttgggaggtcaaggcaggcggatcacaagatcaggagtttgagaccagtctgaccaacatggtgaaaccccatctctactaaaaatacaaaaattagccaggcgtggtggtgcgtgcctgtaatcccagctactcaggaggctgaggcaggagaatcgtttgaacctgggaggtggaggttgcagtgagctgagatcgcgccactgcactccagcctgggtgacagagtgagactctgtctcaaaaataaataaataaataaataataaaaataaataaatataaaacatgtcttgtgggatttaaaatatgtagatgaaaaatatttgacaataatagcacagcagataggagagagctgataaattataaaatcgttagtttgagacgtaatataataaagcaatgatgtttactgtagttgctaggaaagctactcaaacaataacaaaagactaaataactagcaacctaacgaagaacaaaaatgtggaataataataaaaattttttgatcaattctaaaggtgagaaaaaactaaagtaacaaagaagagataaataggaaacaaatagaataatcatacatttactcagccttatcagtaatgtaaattaagtataaatcgactatatttgtaattaggaaccaaatatttttggatgagataatatattaaaacccagtaacagattgattatcccttatccaaaatgcttgggagcagaagtatttcagatttcagatttttttttagattttagggaatctgaaatgctccaatgagtatttcctttgagcatcatgtcagcactcaaaaagttttggattttggagcattttagctttgattttttggatttaggatgctcaacctgtatatgcttttcgcaatagacaagctttgagggtacaaatttgaaatgtatatttataaacttgaaatacttacatatatatgtatataaatatacacacacaccccacacaatccataggcacacatgcaggcagacaaaaaccaataaggatatagaatatttaaacaaaattatacccatcaactgcagaatatacattttttaagtgtacatagattatttataaaaataaacaatgtgctggaccataaatcaagtttaaataaattgcaaagtattgaaatcacatgcgttctctgaccacagcgcagtcaaagtgcagtcaaagtagaaatcagtaacagaaagataaatagaaaaaataaaaatatttggaaattaaacaatatacaaaggaaattagaacattgtttgcctaaatgatgatgaaaatgatatgtaaatgtgcaggaagcacttaaatagcacatagcgggaaatttataactttaaatgcctatattaaaaataaagaaaggttgaaatcatgatctaaactttaattttaggaagttaaaagcaaaattaattaaactcctccaaaatagaaggaaataataaaatcagaacaaaaactagcaaaatagaaagaattatgttgtggaaaatcaacaaaatcaaaagtcgatttttaaaaaaagattaacaaaattgataaagctctactaagactgatcaagtacaaagagaaaacacaacagtatcaggaatgaaaagagatgtattacaatagattctacaggtgttaaatggatgtgaatgcacagctttatttcaataaatttaacaattagttggaatgaacatatcccttgaaaaacactgtttatgaaactgatatacacacagaaaaacatgcataatcctatggctatgaaagaaaattcatccataatttaaaacgttcacattcacacacacacacacacacacacacacacacacacacacacacacaccaatccacccacccatacccttgcccagatggcttctttgaggaattcctctaaaacctttcagggaagaaataacgctgatcttgcataaaagttctcgaagaacagaaaaagagagaatggtttccacctcattttataaggccagcataaccttgataccataacctgacttagatattataagtgttgagcaaaacaaatcagacacagaagagtaaatactgtttgattccattaatatgaaattcaagagcagacaccacaattgtaatcagcataatggttattcttagagggatgagatactgactgggaaatagcatgagggaatcttttggaatgctggaatgttctatatctttatctggatactaattgtaagagtatgtacatatgtataaattcattgagctgtacacaagatttgtgcactttatgttatataagacaaaatactataaactctgccataacacatggctattctcatcatcacataatttatcttctatcttaattgaatccaatgtgcatttcacttgctaacattttattttgactgcatttgataaatgccaacttctgatggcagctggcttgaacagcagggagcatatgccctaggcacccccatccctacaactttgggaataaaggaattagcctaacctggagttgactatgatagagtatctagttttcccactctgtctcgcttgctcacttaaaacagcattattttctttataggcccggtggttctgggaagcgtacttccagtcaattaaagccattgccctggccaccctgcagattatcaatgaccggatctatccatatgctgccatctcctatgaagaatggaatgaccctcctgctgtggtaagtgaattccagtgctagccacatgaggcatggtccagctgtcagggtgggtggaaggaaaaatgtactacaattgtaaaggttatttaaattctagctttctaagatgagagtgtgctttttatacttggggcctgataagggcagcataattttgaaacactgacaaaagtaaaaaatacggaagcagcagcttccagtgtgttttaagtgcttagaaagactgtctatttattgcagagataagtaaggaggcatgggtcttgttggaaatcaaagacatcccggtgacttttgcaattgtaatgcttagagcttttgaaaaacttctgtaagcaacgtaataataatagcttgtattttgagtgcttactctgccagggactgtgctaagtgctttacgtgtattacctcaattaatatttccaacactctgtgaggaaaataataagcagaagtgatctagaggcattacggattgctatagtcatttgctcaagattgtggcagaggcttctagctacttccagcaaagagatggagcagtcagaagctgctcttgggccttcctccttgtgtgaaggaatcacaaggcacatgtgtccttgtagaaactgtggcagtggcttctaggcacagcttctttctcactgaaaatgcctgaagttttggagctggaaattactacttcctagctgctctgaagtgaacctggctgtccagctcacagacgtcaaggcattcctgtaagagaactagactgttctccattcttcattctaattgtctctctctttctgacctctcagccctccttgtctcctgattctaccttttctttttttttttttttttgagatggagtttcgctcttgttgcccaggcttgagtgcagtggcgcaatcttggctcactgcaacctccgcctcccaggttcaagtgattctcctgcctcagcctccccagtagctgggattacaggcatccgccaccaagcccagctaatttttttatttttagtagagacagggttggccaggctggtctcgaacgcctgacctcaggtgatccacctgccttgtcctcccaaagtgctgggattacaggcatgagccattgtgccaggccccgattctaccttttctaaatagtgctgtatatggctacctggttaatcttcatataggaccatccttttctctttcctttcctgcccaccttcttccttctttcatccagcctttttgaaatggttactgggttttaggcactctgagaggtgttgagaatacagaaaaaagaagacagttcctgccttcaaagaagctctccgctgatttgggaagctagcaagtaatgctgtgaatgtagaggtcctgtagtggagtagagtggtgtactgagtgctgtggatgcaaaggggacaggcatctctcctcactgggacacctcctgaagagggagtgcctgagaggaagtcagtatgtgcgtatggtaaaaacaacagcaaacatctttttgttttgcttgaggtgaagtttgcttctatctccccgactccattaccaaaggtaacatctcagaatgtaagcataattttgtagttttaaaacatatatgggattatactaaacatgtttttctgccttttttattttagcactagatcatagacttatttttgttttattccatataggtctccttcagttttttaggatggctgtattagtattcaattgtttgggtatatcgtatgtaataggtctattattgataggtatttagactgctttctttttttttcttctttctttctttttttttttttttttttttttgagatggagtctcgctctgtcgcccaggctggagtgcagtagcgcaatgccggctcactgcaagttccgccttctgggttcacaccattctcctgcctcagcctcccgagtagctgggactacaggcgcccgccaccacgtccggctaattttttgtgtttttagtggagacggggtttcactgtgttagccaggatggtctcatctcctgatcttgtgatccgcctgcctcggcctcccaaagtgctgggattacaggtgtgagccaccgcgcccggcctttttttcttctttctaacagtaacaaggggcatactttcatatgtttacacataaatatgtggacatatctacagaattaattccaactaagaaattgcttgaagaaaatacacattttaaatgttgatagatattaacaaattgccctttcaaaagactatattaatgtatagtttcacaaataacatttgggtgttctagttctccatgtcttcagcaatgctgggtacttgaacttttgctcatctcataggtgagaaatgatcttcatgtgtatttttcaagggaaagactgatatctttgtcgagttttctcagataattctatttgtatttttattgttatcacattgcacttttagattgttttagacatttatttgttcagttggtatttattgaatgcctgccttgttccaggcagggtgcttggtactttgaatgaacaaggcagagaaggagccatgcctttgggaaacttgcattgcaatggatctttctatctagaagaaagatttgtctttctggtagaatttacattttatatatatatatatatttgtgtacatatatatattcctttacaagtcttggtaaatatttcttagatttaaaattttttcttatactctaataaaagaatactttctgatcttatagttcttaactggttaccatttgtgtacagacacattttgacttttgtaaattaattttgcaactattctgttactgacctctacagttgtttactttttttagttgattctcttatatttttagatatacaattatatctacaaatgctaattttgcttcctttttccagtatttgaaacttttattttttcttttatctaattgcattggctagtacttccagaacaatgttaaatcatgatttgaatgttaaaagaaaagggtaggtattatctagtcagagaaaggaagaaaaattccatccagaaggaacaacaaattcaaagatacagagggacaggggagcttggtagtttaaggaacttcagagagttcagtgtggcaacagtgaaggaagcttgggagggagaggcagaggatgaagcctggagagggtccagatcacaaaacaccgtgtatcttacataaggcattggagtgttatctgtgagaaacaagtgatcactgaagccttttaaacaagggagtaatgtgataagattgcattttgggtcagtctcatcttagtgtggagaatggatgatgcatggcagtgggaccagactggaggcagtagactgtttgagaaatgcagatgaaaattaatagaggacacatttgagtggtatctggaaaaatggactgttctaattggtaagtgagggagaagttcagaagactgaggtatactgtacggtttatccagatagggaatttggttgcatgaggagtcatgggtgaggatggtattggcgtccaaactcagtctaacagcaaggccctccacaatctacctttctttttttttcttttttttctttttcttttttttttttcctgttctctttcaaagagttctagatttctggcagcacaactcaatccttcctctgtgtgcccctgcttttcatcctctgtgcctttgtggctgctagccttttccttggcacacctttcttccccatcatctgcagatttatacaggcttcagcagctggctggtaaactttctccaggaggttttctcaaccccttcagcaggaagtaactcttagagcatgttatctgtgtttcttttccatcacttaacatgtatagaagtagaatttcctgtaaagttttaagcaccttaaggtcatttctgaccttggtgcttctcataatacctaggacaacttaattcagacaggaagatcttgacatataaaggaaagaaagagggatggagagagggagaaagggaaggaaggaggaagattggcagactaggagttgagccatctaagacacatcctgctggaaaggtagggaaagtggtagattgtttctcatctgtaaagtggttgtaatgagactaacccaatgacttatctaagatcattggcaagttggcaagtaattggcaagttgtgtgaacaagtgataactcaggtcttctacgtgcagattatcttgaattgcctatggaattataggggagcccttgagcctcctctgggctgaaatgttactactgttccaagcaaatggtacaagcttgagatgaaaaatattacatctgttcctctgcaggagaattcatactggtgcaggcgaattcataaagaattctgtctggtcatgacccagacagaaagtacagcaatagtgggactttatcctatacttttatctaaagctctaagagatgtttaataagaataaagggttggaatttagttcttttttataagaatataggtaggctaggaaaaatagaatatgaaattttgcagttttgaaatagatatgttttaattcaggacagaatggtcaaagtgctaaactcttaacaatttgagaggtaacataagcataaaaagcataaatcaaggtatataactggaaaatatattctctatatatttttaactctttcttaaataatcctttttaggatactttggtatttatcacatttctagctcaggtgacaagagccctgatttaaagcagtgggttatacatttctccatcttcagtgaaagcaactgatgggaggcctgaatagcgatggtttatttatagtttacttctcctcttccctcagaaatatttaacctactctagatgagattactatgagcccaacctgcaggggagtctcttctctagattccatcaaatttatgatgtctgacattccgaggtgggagtaggtgtggatcttggtcagtaaatcaaggggtggtctggggttttcagagatacactcttagggtctccagccatgcacagagcttgctcagactggagaaggagaggtgagagttcagagtcatattttggctagatgcagctgccttagtttaatgtaaaaaaaaaaaaaaaaaggcctacgtgtgtcgatgattatgacagtgagaggtggccttgcagagtattcatgtcactagatgctttgtcactcttatctgtaaaactagggtgatgacattatccacgttgcaccacaccctcagaacctgaaaaagtttgacacagtaaaacttggaaataatgttaaagtaatacacctgtctaaactggagagattgaccttttgttttgaaaggaattctttttgaaaggaatttatcaccaagttaaggttctttattaggggaagtgtgcatgtttttatattaattttcttagctgttcatgttaaggctgcctatatttttatgccttttcagtctcttcatgcttttatttttctctcctttttgcaaatatcagcaaagctttgtcatctccctaaatatcctatattacttctaacttttatgtcatttctggtcttgcctcttggcagaccttcatccgcacatctggggctagcctctatagctagggttctccttggacaccctcctcattttacttctgtttctctgccagatgtgaacatatgtaggaggacagagacagagacaagtgagcttcaaacagtgaattcatgtgtcaccaaagctatgtcctctcagtgacagctttttaaaaactaaatgtaatatagtctgaaaattatgtagagtggagtgttttcccatgttatttttctatgatgtgatttaaaagattatactgcatcttatcaatgttataattttatttacatttttgatagatggttttttttccaagtttgctatcataggtaacactaataaagataccccagatttttttcctttctgcatttactttaccagatttaaaacagaaagagaagagagtaggggttcttatggccattgacaaaaattgatgagaaaaatggggaagcatcttaaaatgaattattatacccagaataagaatgaggttgaaaaacaagagctttttctatgaaatctagccagagtggcaacttcactgcaatcaaagcctcagatgaggattagatacttccctggacttcctctaagcctcagtctagctctagtttttgaagatagaaagggcaagggatcagccagatgagagtattgcataagagcacttgattggcaagaatcacccagggggatcagaaatcacagctgtgggcaaaatgtggtagagtgtgccatggggcagtggttctcaatctttagtaggcatcagaatacagagtgctgccactccaccctgagattcagattgggtaggtctggggtaggaacctagaattcgcatttctagcaagttctcaagtgttggatattgatgctgctggtccagggaccatattttgatgtgggatttcattcactgtgagtgtcctaactcactccctggagaaggctcttcctttctcctcatccatttcctcctcttaaccctgcggggcttggattagaggcatccagaggctgggttcagactaaatctgtctcagctacatgaaaaactcagggctgcctatacttagatgtccagacggtggccctcactcacaaaggttgtggttgtacaagcagctgaaaatatcactcagctataaacactaacaagcaataaatcactctgcaagctgaagaagcactagctcggatgtatgaagcagaactctaagttgaaaagataccaggttaacagtctgtgtaactcaactcagcaccctgtaagttgtggaatgtttctctggaatttgaaagcctaccctgccccccaggaggccttcttggcttattctctccatcttcctcctactgcctagatatgattaaaaaaaaaaaatgtatggaatttagaaattttagcttgaatttaaggtaagtttaagctttttgaagtctattgtttttataggtatcacatttataggatcacatttgcacaagtgatccagtatgctaccctaaattccagacctttccttgagtagtaccttttacttctttggaagtgagctagaaagtctcaggatgtcagcagccagggaataaggaaagctgaactgggtctgcagatggagagatgcagaaagacacagagagcttgatctggggccccaagcaaagaacttggccaattctgatggtcagatagaaaatggtaaagaaaatgaaaatcacaagccagatccagatggggaggatagataaagaatatgaaaagacggactcgaggatattgctaagatgatcttgtcaatcagaagagcatactagagcttttgtagcagagataaactaatgtgcctgtgtaacacacatctgcgtggcagccccagtggtggtgctggatgaatgaatctacacacattgtttccttagatgcagtcctgccttcattgcttacttagagttcacttttatggctctagctttcatgaatcaaaacctgactgcttccttacatcacacagcttgtgggagggcagtgagtagaatagtttttcagagtccgtgggagcttgatctggcagcagattaattaagaacatactgaatgttttggcaaagtaatctttcatgtaccaactatcacttatattagcacatcaaattccctttccccttttttcaggggccattgtaattctcccttgaggtctgcttaaatgattcaataatagaacttaccagggaaatgtgataattaagtattataacctcaagataatgaattttgtttccgtttctaatattctgtcctttttatgtgtctcccaattgattaatatttgagtataattttctaataaatgggtcattacagctgcagattaggaaactttacacactgcttcaatgagaggttgattcttgacttttgtgtctcccaattgattaatgtgtctcccaattgattaattttttatgtgtctcccaattgattaatatttgagtgtaaatttctaataaatgggtcattacagctgcaggttagaaaactttacacattgcttcaaccagaggttgattcttgacttttggctctcccttttttttccctcagctatatttcttggttttgtgttttagaaaatagtgcggcttaaaaattcaagtaaaagaaaccatagaatgaaaattagggcctgttttcaaggagtaactgcttttaactctaacttttctctgatactttcttcctatttccccattaatgctgtttttaaatttcttactcagaaacctctttttacttcaagttagcactttttctcctgttgtttctacttcccctatacactcctcctgttccatcttaccgttatgactgtgtcatcatttttcattaaagtggtatttattatatgcattattagagctgtataaatgttgttttcaactgaacaaagttgtaaacaaggattttgttttctttcttgtacagctttctattttccagagagctaataaatgcctgttgttttttcccgcagttttccatgttcctatcactaatttaattttcctggattcccaaacaaaataataaaatgatcaagcacaagtgaagtccaggatttttgtttctttctggagtcatctctcctgtagcccctctcttcggttccagtctgcagtgattgctctccaggtctcctgtgcagtggtcatcctgattctcagttcactgtgacactctgaattccctttgtgtctctgctctgttggattttttatttccatattgtaacatctttctctgttttggtttttttccaaaagcttcttaagaaatggatgaagggagatacattttctgtcaccttacatgtcctaaagttattctggctgggcgcggtggctcacacctgtaatcccagcactgtgggaggccgaggcgggcggatcacctgaggtcaggagttcaagaccagcctggccaacatggcgaaaccccatctctacaaaaatacaaaaattagctgggcatgatggtgtgtgcctgtaaccccagctactcgggaggctgaggtgggagaatcacttgaagccaggaggcggaggttgcagggagccgagttcgcaccattgcactccagcctgggcaacagagtaagactccgtctcaaaaaaaaaaaaagttttttattctgttacacttgtgattaataattgggctagtgtagaattctggttgaggtgggttttcttatgaattttgaaaggattgctccattatcttctaagtttttcattttaatctcaaaaagtgagatgtcattcttattcctggtccttttgtgtgacctttgtaacctttttttccttcctggcaaattctgtgttctaaaattttatgatgatacgccctgacgtgggtgttttctgctagctggatactgatttggacccttttaaactggaaatccatgtgcttcagttgtgagaaatttttgtattttatttctttgattattttatttttctgttttctcttttctttatgggacgtctgttacatagatgacgaatgtgctagactgattgctgtttttcgtaccttaccatctttcggtcttcttctaattttttggatattttctcagttttgtattctgacctttcttttgatttttaatattttgtttacttttaaaatctgagagtttttttcctggacttctagttaatcttataacttcctaattttgttttaaagttggagtattttctctctgaagatattatttgtggtttttagtttttagttttcttcagctccttttattgtttggtttctttgaattcctttttcagtttttgtttgctatttttcttattggaagctttcttcaaatacctgatgattattggcagtctgctcttatttgagagtgaagcactgaaagctgattggaagctctgtatacatgaataaggcttgtcaagcaatgggctccacttaggttaagaggatggggacctgattgcctaagtattggcatccatgggttatttctcttggactggctcattgatcagagaataatctttctgttttgggggttggggaaaggatggataataattctgggctgcaggtattttgggagccgaatagaggaaggagtcgggttctcatccttcatcctacagattattatttaatctgttatatttagtatggtgcctcaccctgctttctgtgcctggggtctctgagtccggaatctccctcaatcattttttctagaatataaacctcccttctcctgtcaaggttgaggggtggggtaacagggagatggttggcctgtgagtgctaagtttaagggatcttgagaccaactgttccttatttctgtttccagagccccttcttccaggataccaagtatctccaatttctgagttttattatcattatccttggaagctttagctttttttttgctttgccatgtaggttattgtccacctatctatattttgtttatttaaattgatctaaaaactatattttctaaattttaactttttacgttgacatatttcagaattaaatttctaaaaatagtacactctttacccagatttcttaaatgtttctgtgtactcttcacccagattcttcagctgtttatcttttatcacagttgctttattcctttttctctgggtacatgtgtatgtgtattttttcccctgaattttttggaagttgcagatataatgcacctttatctctaaatacttcttatacaaaatcacaataaagtgattgaaatcgtcaagacataaacattggtgcaatattattatttaatctgtagatcttatttcgatttcatcagttatcctaataatgtccattagaacaaaagaaaatccaagaccatgcattgcattcatgtctctttagcctcctttttaagtctagaacaatttctcagtctttctttttcttacctgaaattgacatttttgaagagcacatgtatttctgtaagacgtcctttgatttgggtttattattttgtaagttattttgtaagatatcctttgatttgggtttgtctgatgcttttgcatgatgagattcaaattatgcattttgacaggagtgtcatataagtaatgtgttctcaatgtatcatattggagaacacatgatgtcaatttgtcctattactggtgatgataacttggatcacaggtttctgggagtttctccaatgtcatgccaagttactacttttccttttattatgtgtcttgtggggtactactttgagactatgtgaatatcctgttactcctcaaagtttcacccactagaattttagcatccattggtgattcttgcctgaatcagttgttatagtggttgccaaatagtgattttccagttcttattctctatcttctcaaataagttactaatttttttgagggtgatttgtctttttaaacctgaagattgttgagtttaaaggttcttctttaatccatttttggaaagttttcattctctctttgaatattacatatctgcaattctcactaatctttccttctagaattctattaaatctttgttaggccttttattctgtccttaccttatgtctctcagctttgttttgtttcgttcatcaggttttccacatttttctctctctgtgctgcatgctagataactttttcacatctattttcctattttcttcatctttgactaatgtgttttttacccattcatcatgatttaaatttcagtggttatttgtagaagttctatttgattatttttcaaatctgtctgcctggccttcttcatagcatctttttttctcacatttttaattccttcttttatatctttaatcatttgagacacttactttatattcttcatccaattttctgaattcctgtgaggtctgatcttgtcatttgtctactgtccactgctcttgttgcattgtttccttagatgttttataattttggaatgtgagttcatctcacatgtgaggttttctgtggaaattctcccatcctgggataaggaggtattttccagagaatttgtttttgtttattttgcttcttcaacattaatgtctcactggaggtttctgaaccactcagataattcattgaaaccccaaacctgcatgagccccagcctctgttaaaagctcccaagggaaacagagctgacttggttacgaagcagtaagctctttctctttctgcaagttggtgaaaacatgctgttccagggaattttattttttcatgtatcatgatatttacgctgggaagccttgttttcccatgttatagagcattcttggtttaataaaactagctaaaaattacattttttcttaaagtaagtgctctttccacgtgagaactacttttttttgtttggtttgaaggtaagaaagggaggaggaacttttctctttatataattacattgagggccgggcgcggtggctcacgcctataatcccagcactttgggaggccgaggggggtggatcacgaggtcaggagatggagaccatcctggctaacaaggtgaaaccccatctctactaaaaatacaagaaattagctgggcgtggtggcgggcgcctgtggtcctagctactcgggaggctgaggcaggagaatggcatgaacccgggaggtggagcttgcagtgagccgagatggtgccactgcactccagcctgggcgacagagcaagactccgtctcaaaataataataataataataattacattcagcctgtgatgaagcatttgattattagacagcaatgtcactgatcagttttttaagttgtcagcaattaattgtaaacactagtgtagtactcttcattatggtaaatacagttgtcttaagatgaatggctcatattttggtacagtgcttgatgttcaaaacaaaatgttgcaaaacaataagcaaacataaattgaaagaaaaaattccccaggaggattccccctcacccacatcaccaagctcaggttgagaaagaaaagtgacttttgttgcttctgtgtactagtgagagactttttctggcccactctttcactgattgtataggccttcaagggatctggtttaatgtacaagtctcacttctaacttccttacttcctgtgcccaaaaccaagtctcctgttccagcatgagcgttaaaaccaactacattgccaacccctgcaacaagcttggccctctgcggtgccacagtgccaactagctcctgggcgttcagctttcatttgcagttttttcttcatttttggtccctagggacttatcttttccagtgacctcagctgtatatttaaaataatttttgttctattttatactacatttctatgttttatagcaagaggattttgaaaaaggaaggcttcatctgttttaccttccaaaaatttgttgaactctggtccattcttgtttccaataaaaggtttttttttgcccttgtgggttcatgcctttttttcaggaagaagcagagatggagcacagcagacaaaacatatgctttattggaattccagagaaattaatatttaagaaatcactttattgtggagtctcttctttccactctgtatcaactttcattttggtgttaggctcctaacagctcaaactatacagaaactgtggttttcttggttataactgtgttggtgttttgagcttggatgccataagctgtaatttaatcactccccaaagttcttatttaccaagccaatgaagtcttcccctataccatagatgacctctctaatatggtcaggggctaccaacaatcatttttatgcccagatcagagaatgagctactctttcaaactgtcagagcatttcaagtatgggagaatcagttgaaactgtaaatttgttttacctctcataagatgtagtagtataagccatcatgaacattgttggacactttgtctttggtttatagattggctttctttgtttgaatcagataagtcactagttttttcactgaagcatttaagtattttcagtgtatttatgaagtagcaggtccaaggatgatgattgaagaccttgttctaaataatctaaatcttttgtactgtaaaacagctgaactgttatttttaacatatcaaattataaaccaataaaatcaatggtatgttatctttgccagtatcttaagcaatcatactatagatatatttagtgaaatttattacttgcagactgctgtaactcatgaattattaaaagtatcagcatatggaaccctctcttccctcattccaaattcttttaatatggcttatgttgaaccatttaaatggtttctgtccatcccactaatggaagctgcagccagatgagggttcttataaatgattggctttctttccaagcaagaggaggatgaaatgtcaactttttcctctactacctgaaaagcaatcagtggcaacctttcttgctctccttgacagtagtttggctttatggaagaagggtgggcatttagccaaatgtgaatttcagtgctatatgaagaaaaaaattgacgtagctaaaactcagataataacaggaattttcaagaggcattcaaatgggtttaacctgtgagccttccagtaaactaactgtagcccagaaattcctaaactgcacgtttcaatcccttttttcttgaggatgatctgagtgacttgaggttacttaccaaatctctctttgcaacaatttgcccatctgtaggactgaaattagggataatgatagcttcagaagaatagtgtaacaattagcaactgattattttctgatcatatgattatctgattatgtctgattataattaaggccattgcaaaggacatttggaatcaaacctgagctcaaaaccatttattagcttgaccttgtacaaaatttccttccttccttccttccttccttccttccttccttccttccttccttccttccttccttccctccttccctcctccctccctccgtccctccctccctcccttctgcagcggcacaatcatagctccctacagccttgacctcctgggctcaagtgatcctcccacctcagcctcctgagtagctgggattataggtgtgcaccacatgccgtgctacttttaaaaaatcttatttttgtagagtgcaatggcatgatcacagctcactgcagcctcaaactcctgggctccaccaatcctcctgcttcagcctcctaagtaactaggaccataggcttgcaccactatatccagctaattttttttttttgtagtgacagggtcttactatgtttcccaggctgatgttgaactcctggcctccagctcttgaactcctggcctcgagcaatcctcccaccctggcaagtttcttatctctttgaatttcattattcttatctgtaaaatgaggatacttatttcagagaactattctaagaaattaatgatatacatggaagcattttgtaagtggtgtggagctatgagaagtgaagtgttgataattataaggttgatagtataatgctgtatcacatggaaacataaattttagaattgggtgggactctggagaggaaaattaaaaatacaggagggtattttttgtgcccagataggtcttattatgtattttctcttgtttattccttacaacaaaaggtagcattccgttagctctattcttacagatgaaggaagtgagacatatttatattcaaggcccatccactgatcacctctttttttaaatgaggaaatggaggtccaaaaaagtatgttgattcatctaatgcagagattctgtgcccatcattccatctattatactgctttcttttcatataattgttttcatcttgtacccaaatttggcccccaagttaaacagggaacacaatgacacataagtacagtggcagtgtaaatataaaaaagacttctgtccctggctttctgataggttagatatgctaagtgacctccttaagtgaacaactaaaatattgaatgaagtattataaagcaattttaacctattgctgagctggcaggaaagtaaggtatttgctaatccccaaatcaaagtgaaacttggtatcctgggaggtgagtgggagccaaaatcagcttttgccatggagacttttgtagaccttgatgatctggagctttgacctggtaactctgtgaagtaagggacagggattaggatttaaatcctgtggcccatccaactctcacaagaacttcttggatgaagctaggaaactaaaagattatgtcttcagtgaaagagtaaagaaggagtaaacctgtctgtattgacccttgtgattaagaactgcaatcacaagccacccccacatggattcatactacagttatcatccaaataagccttatgaagggaatttagttgaaagtggctttgtattgataggaaccagcagaagcagacacaaaccctgtcataaggaccatattttcagtccaggtctcaaataattcttataaattaagtgtctgaggacaattagcagctcacaaccataaagctataggcaatattgtgagcgagaactaccagaaacagacatgcaagggcttgcaattattagattagattattagagtcaatgaaattgttcagaatgcagcccaaagagacaaagaggtggaaaatatgaagaagtgaagtaatatagagaacagagagagaaggtccaacatacgtctaagctgagttccagaagaagaggtggggaatggaaagaagccctattgaaaggatcagagctgagaattttccacaattgttgaatgacacaggccgcagatccaggaagactagcagaccacaagcaggataagtaaaagtaaatttacagcctggtaatcataatgagactgcagtaaaccaaagaaaaagcaaagatcttaaaagcagctgtaggaaaaagagaatagcagtagacatatttggcctgctcttgtgaccctgagttagtctctggctcagtttcttcagatatcagtcatggtacttgttagttcagtacccccaaatgtgatgccaccatttagaaaactcacttatgagcaaattgctgtaaataggtttcaggagctttaagttgataattaactatcttacttagttgaagccttaagaggatttctagcctttgattttctccatttttcacatgtctgtttaatggttggtcagtgagatttggccttcagtgttattcttgtttttcagaacagtcagttattgtattagtctgttctcacatcactgtagagaattacctgagactggataatttagaaagaaaagaggtttaattggctcttgtttctgcaggctgtacaggcttctgcttctggggaagccacaggaaacttacaatcatggcggaaggcaaaagggaagctggcatgtcttacatagctggagcaggaggaagagagaagggggaggtactacacacttctaaacaaccagatcttgggagaactcactcactgtcatgagaacagcaagggggaaacccacccccatgattcatttatatcccaccaggcccctcctccaacattggggattacaattcaatgtgagatttgagcaggaacacaaatccaaaccatatcagttattatttgagagtgaaatgaaatagacatgtgcatcaggtaaacttcagacttgtccccaaaacttttctctcttgagctaagagatgctacttgaagacattgttaggtctcagtaattctctagttttgcaagtcagcatgtgcctggctggtggagtgctgtgctgtgggtatttggggctgtagaggtttaatggttaaggcaacatggaccacattactgattgcccctttcaaatctcccagtaaccattaacataaatatcatctcaccattttggacaagggacaccacccttatgcacgttagtaatatgatgctaatgcttaactctttcattgccctgcttcaaaggccttgtcctatatccattgatagggagtctctttgaacctaaaggagaaatgaaagggttaactccttttggttttgccctttgaccacttctggatgagaggcatgatgaaatacttttcaaagtcttcagtggaaacacatcatgcataattggagcaaaaaagaataaatcaaagctttttttccccttttagtctggtaattcataattgaaaccacattgaggtaagggttgataacttcaaaacaaccaagaaaactgccctttctatcaaggtaggaataggtaaggcttctcattactaggtgctgaaaagcttctgtatagcaggcctgtcctcttctcttcctttcttctctgtcttctcatttttctgtttaggcaaaatacgttcatttaaatcagatataggttgactcaaatatctgctgaattctcttattttcacatgaagttatacatagtgacaaaaaatctctgatgtgatgaggaatagtaattaaaatttggatcatcctgtattgcagcttgatttcttcagtgctacagtttggtttggtttaggctgaaagagtcttttagttggtaatgaaatgtggttttccttgctcttgatttcacaatccgagtagcatcagcaagaacgcttcagaatggctagcaaaggccacccgtttaccacctttctctgctttctgtatggtaaccctagaatggttttggttaggctcacacagctaccatgacctttcaactacaagaaagcaaatcaggattgcaggaagggctcaggcaacttcctgtgtttgggaatgccaaaggcacaactagttgcttgagtttgaatctctttcctgaaggggaaacccctttgaactggtagctgactttaagcttagtctcccaaggcctttccttcaaggcatcctgaaacctgagcccacacatccctctcactagtgtctgcacactactagttcttacaccagggctttgcagaataaaagaacttttctgcagctggcattgtgacctgacagttctcgtggctgttagggattacttttatgcaattgcaatttaacaatgtgagatttcttattggcgcttctgtactgaatttggaggagtgagaagtaaacggtgggagaatgggcaagaggtgagcaaggcattttggccaaaggccagcacattgtcagaataatacacacttattcttttggtatctcctcctacctttgagtgaacaggttcatccagtgtatttgaaaattgcattgacagccaaggttttgaaggcatagctgcgatagatgagctttgcctcttctccagctctgttgctggatgcctggttttatgccctatcttgccatcatggagatttaatcaggtagcagagttaattgccagcattgtttgccttttccctggcagaagccagtcttgagtaaattatggaggtttaaatttgcttgatttcatgcagaaagtggggtcaagaggtcccagactgtagacactctccttggtcagccagcagggggtcagttcttaaaggtatttcagaggtgactaaatgctgtttttgaaatgttcctccccaggaagctttttttctctggaggttagtttgctgaccttaccctagtggggtggagtgtctgtgtgaaggtaacaccccaattaaagctgcctttctccacgctgtcactgagctccaaaggcaaataggattatgcttgaggaagggaaaagcaattgacacagaagcttagttgtagatcagcatttcctatttatgactctttgaaatagagcataacggtagccatgtcaatttgtcactaaaacaatgaccaggaaaagaaaatttcaaaagaaacgaaaaagctagctgtgtaacttaaaaaatatatattatttaaggcttttcacaatagagctctaacctgccattacctgagttcctctcatttctgctgtctgacctttctcctcccagcaagctgtgaggtgccctgttggatggctcactgtcttgtcagcaaatctttgcacatgccgctcagcttgcccctaggcttctttggccagccctctcctgcttcttcttaaaggcactgctcagacctcctcatctccaggtagggagaggtgattgtgtagatctcggtgtttccacctatggagtacctttcattctttgtttactacttgttagtttacattgtaatttgtgtttttactgtgctgtcttccccactaggttatgtgtgttttgagaggaaggaaagtgttcatctttgcatctttaacactataccaggcttatagtgtatgttcaggaaatgttgactgaatgaatgagtaccagaaataaagctagtgggaatgattgctgaatcaccaataccagtgttttagtaggcaagatgaatacaaatcgagaagagtggaagtattttgtttgctttaaactctaattcataggatcctgtgttgagccctctgctaaatgtttatgtacataatctcgtttaatcatcattgccctaggaggtagatactatcatgatccctgttttacagatgaggaaactgatactcaaagaactgtacatgtcacaagactagtacatggcaaggcccagattaaagccctctgttaaatatctctataaaatcctacacttcttcagaacacagcacagtaagattcttggtaagtatgtataaaatgagttaactaggttcggagtcatttcaaaactcataattttagtcatttaaatgtacatcagctattcatatctatacataagggggactgataaaacaggcctgagtcatttggctttaacttacttctttaaaaaacaagttttgattgaacaactaggcattgttctaaatagtgggtgttctggctcctgccttcgtggagctttcaggatagccaaaacataatgaatagaaaggaaaagagaaaatcatggaaataaaaacagtatatttggacaggaagaagtagaggtagagaatccaggtaaaccaggaccttgaaacatgataaggtaaagagagggagaaataaggacttcatttgggattcttgtactgcaattcatttggaattcttgtgctgcaagagatctcaagactgcttaggctacctcctatccacttttgagacacatggaacgtaaagcctggagaaattataactcacacaagatcaaccattggctacaatttattgaatgcttctacatgacagtaccttacatatattacctcatttatgctaagtaatactacctagaaagatggtaatagttatatgatgatttttatagacagagaaactgaggtacaagagagattaagtactttgcccaggctatgcagctggcaagtgaaagaacctggattccgattaagaacttgtgattccaaaactgacttcaaacatgctaactcaattttgaagccatttgcattaaccctggtggtgtgttctacagtaaataattgagcctgtgtttgagtagatgtatgcttagaagcttacatactgcctcctgtgttcatctccacttctggattttaagggacggtattggcaagatccagttctccttatgctcctttccatgctgtccataccccccatgctgccttccctgcttctccagtactcaagccctatttgggatgcaagtgggcagtggggaaaaacaacattaagaaaagttactgtccacttcccagccaaccattccttcctgtccttcctcctcccctaccgattcacttcccaagtggagctggcatgtgggatgagacccgatctgttgtcttgccagcgactctggttccatgtccctggcagctccttgaaatcagagctgcgatgcctttcagggctgcctcagtttaaatgccaaggcattcgttttgtgagcctaagctttgcatctcttagggaattttcctctcttcttaatgtcataaagacatttaagtgtgttggcattctcccctcttctcccaaagaacagacctcattctgttggagttttaatagtttttccttctgttttagtggtgtatttacctttttaaatttatgtgcacactttgtgtcagtgttatatattcggtgtgtttttattccatagactttctgaaatcatagtgtttggggtgggttcttgcttattggcccagattttattaacaaggatcaagaacttttaggatttttgtcttagaaaagagctagaagtagcaaactctggagttccccacacttgaattttccaaagtctataaaatggtaatgcatacccagtttgggtatgtatgtaggagggcatagggaagggctgtgaaccattaccgtctggtgttctgaaatcagattgcttgagttgtatctcagttccatcacttacaggttatatagccttgaacatcatttgctatttctagttctacagtttcctcatctgtaaagtgagaacaataaccgtatctatcttgggggttgttgtgaatatctaatgaggtaatacatgtaaagcacagtattttgcacttagtaagtactcagtaaatcttgactgtttcaatatcacacattaaatcattttatacacttttttaaaggaatctttttgtttcttttccacttaaaatggtgtttttcaagcaggcattagtgagtattgtgtcaagagggttaggtgagtgggttggggatagtgatggcacatagaccatgaacggtccctggggattaattatgacttaaatatagggctactttctgacttcagtttccataaaggtcaggaagagatgaagaataaaatttggggtagaaaactcaaaaaggtttctagaagtacaatgagttgctaaggtacaaatactaaaatccaggcaccttcctaagactacagcttaatatcaaagtgtgatgtcatggaaacagaagatcaacattgaaaagatggcctttcctggccgggcgcggtggctcacacctgtaatcccagcactttgggaggttgaggcaggtggatcacctgaggtcgggagttcgagaccaatcttaccaacatggagaaacccggtctctactaaaaatacaaaattagcccagtgtggtggtgcatgcctgtaatcccagctacttgggaggctgagacaggagaatcttttgaacccgggagacggaggttgaggtgagccgagattgcaccattgcactccagcctgggcaacgagtgaaactctgtctcaaaaaaaaaaagaaaaagaaaagatggcgtttcctattgtgtctcttggttgtgaaatctaattatagcatgttgtggacattttggctttaatatcctgattacattaggaccctaggaatcccattcagcttctttgagtttccatcccatatgtattccatgggtttgtgtgcatttctcatcccacactgttacatctggcagacagctgttgtcacaaagttggtgatgggtgtccatcagtgatatggatgagattgatagggaaccttggcaatcccagagtataaaagactagggaagtatgcagcagccataatagcagataggacatttcattctcagccaccttctggcaaagatggaattcagtcctgggctttttgcatgataacatatgaatatgaatgtaattaatgccaccgaattacacatttaacaatggttaaaatggcaaatttaatattatatatattttaccacaatttttaaaagtgaacaatgtaatataccaaaaccattatatgctttaagtgggtagattgtatggtatatgaatcatatcctaataaagctggtaaaatatataagaacatttaaataatcttaattattatcagtgcaaaaatatttttgcttacattgctgtattaaaagtacttaatattttaatggtagcaaagagattgactttctttcatcactttttaaactttattttaaaaacatttcacatttaactgataacttttgagaattgtacattgaactcacatgttcctcacctattttcacacattgtgaacattttctctttattctctgtgttcagaaatatgcactttgatatggcagtggtttttgtttttttatttttgtctttttaaaaaattcactgtgctgcttctgttaatcctttgcaatctgaaaattcatgcctcttatatcttaacgtactgagaacttctttaatttctttgatagatttacttctcccatagtctgtgttttcttttctggaatctcctattaaatagatgttggaccttctagattttctcattttctctgtccttatttttcatctctgcctttttgttcaccagtctggaatattttgtcatctttatcttgcaatcctgaccttttttcccccgactgacaggaccaaccaggtagcaatcctgccctcaaaaaataatttaaactattatatttttaatgttgaagagttgtttctgttctttggtagagcttttaaaataaaaatagcaatttattcttgtttcatggatgaagaatcttatctgccagtggctacaatttgttgttgatgctgtttgaatttccttctgctgcttctgttgtttctgttacttctaagttcctttttttctttattcatttggtttctgacattcatgctgaagatgctcttgaaatgcctgtgattctagaatctgctcatgattgagagggaagcgctgaaaagctgatcggaagttctttgtgtgaaggccagcttgttgcctggaggacttcactgtaagatgttggggtgccgagctaaccacatggctaccaatgctttgggaactaaaggggaaagaaggctgtagggcccaccattcagaatgtagatttttagcctgtattttcctctcctctgtgcctgtatttccctgtctagagcttcagtttccttggagaggaaacctcccttctctagctggggtgagggaagagtcgtttttctggctgagtaggatcaagggagggtttgtgaatctgggcctctaactgctccttaaacagatttttaacagtcttcctgttttcaaccttaccgcttctcttacctcacaaggtatctgtgagtttcattcctgaaccctgtgaattcccaggttggcttgcttgccatcgctgcctcccctcctggtaggtgcccaggtctccactctcactcctcctctgctaccccttctctagccctttccagctttcaaaaatatcgtaataggcccatcagctgttgtctcttctcccatctctttgtccttgtagatttatattcttttatattcatcaactgcctttttattgggtttggggagagaatggagataaacgcatgctttaatctgtcatgtttaactagaattcttttctcagctgcaaaagttctcagctccttttccagtgatatcagaaccaaacttaattagtccatgcaaattttgaggaggggaagactttgagcagttgcttagctctgggatctgtcctggtaaaagccaccaagcctgccatgtttgggtttgctgacgatattgggtcagccatattgttacagctgcttttctgacccgtgttaatctgtcctcttgtagaagtggggcagcgtgagcaatccactcttcctcccgctgatcccaccacagtctcaagggttcaccgccatagtcctcacctacgaccgagtagagagcctcttccgggtcatcactgaagtgtccaaggtgcccagtctatccaaactacttgtcgtctggaataatcagaataaaaaccctccagaaggtaagaagccttagtgcctctctcagctggatcaattttggatggccaaattattcacatcctttgttttaaataaattttcctgctttgtcaatagcaataccatttctgagacagcatgcctccatttttctcagtcatctcattcttgttctagggtggcccatttaactccaagccctggcatactctgtagccacaagtgtttgagggcttaggaatcaacaggatcaaaggctatcagccttaggaaaacagatctcagcttccctcagccatctcagctgatttgtttacatgaaaactcagtttaaaaggcattagttttctcctttcttatctctgctctgatgctgtactttctcaaaaaaaaaaaagggatggcctcacttctgattggaaaagtcagcagcaaagcataccctgtccagacttcaagtcaggtccttaaagagagcaatcactagaagttcccattggttcttccttaatcactttgttccttgccttggccacccctgtaatctgctggctggcagctagggttgaggactatttgattcattggatttgtttttaattcgggacgcacagagtatgttccacctgcatttggtttctcattcagtctgtgtattactgatcctaatcccagggacttcaaagctcctgccatttatagcctattaaagccaggaagtttctgatggattagagcaaggaatgaatgagtttgaagttagtaatgtgcaccactgtcaccgataaggtctagtttattgcctgacagtagtatctgcactttttatggctagtctcttttaattggatatactgaagtcgggaaagtcaaccttgaaaattgccagtagtagatctatagtctaggctggaagaagtccatatttctggctctgttaggcaaatcagaatttgccttgagaaaattctttagtttctcctttacttcatgggatgtttgttctctgagagaatcatatgctttctttttagatttagggagccacagtttgagtaaataaaacagctattttaaatgaaggtcctgtattattccctgatttttaaaaattaactttctatgccaagatttgttttctctttctcaacactataacatggccagttttctggatttttgttttgtttgatacttaataagggagaaggaaagggaggggtaaaagaaaaaggaagatgtgggcatcatttaagaagggaggatgagaatacagaaaggaaggaaaagagagacaattataaggaactatgtaaagaaggaaattgttgacttggatttcttcataccaattgcctttctccagagtgaagtgaattggatggtattgcattgctaattagtcccttcgtttataaaggatgggctatgtttgcagaaggaaggctgggcctctcattgggtctggagtggcctgttgtgtcttgcagtagtcacaggcctgtatttgctcctgcatggaaaggccaccagctttcagagagactctcagcctgctcctgcaatcctgcctgaaaggcagagttgcaaattctagtgctaaatgcaaaagaggcttctccttattactcctggttagccactttaggcataaggtgagttatttattgtgaatttgtgtcacttctttggggaaggtatcattgcaaactgtgagaaaggatacatttttttttccttcttgatctaagcctctacactggcacaactaaaggcagtagcaggagcccagattttggagttgggtgttcagttttaatttttggtaagaccctgctaaaatgtagtggttaattttatgaccaagactttagtttatttttaaaagattttgactctagggaggaaaaagagcccttaactgatgaggccctaattttgacatgtgtagtgactggactggctttttactaacagtggtttttaggtcagggctctggctctggcgatgtggttgtttggggagaacatgaaccatgtttaatcttctgtggggtgtttgttcagttggtaaatgaggctgtcagctctggtccgcatgccagcaaatgcatctgatttttcacgtacagcattagtaacatatatattataaaaaaaaaaaaaagcaagtccaagtctttgaaatattagaggcaaaagtgatgtttttcgctttctctacatttactaaaataaatattgtggttaccatgtctgctgctgggaggatttgtgtaggcagaaatctaccccccttcccacttttttttttttttcattctccaacccaaccaaatacttttttcttttggttacacttaagtccaaatttctgggttttaagtttaagtaaatacttagactaggcaattgaaatttccagtgagctttcatcacattgattttgagctttgtcagaagaaaaggcaggctactgcctttcttcctttaactgactttagttttaaatttgaattaacatcaggagccccccagcttcagactgtggtttgcatagtccttagcaggcagggtggggttggctgagcatgtcagcaacccaggatggtcaacaggggagtaaaaccagcagccaccttccttttgagccgagttctaggactgcggggagttgggtcatgagaccagctgtacaccagcaactcaggcaattctgaagtgggcttaaggtttgtatggaaataatctgataatttattttgtgaatctgtggttgtatttatgatagtgattggcaggatggacttggggtcatcttcagtcaacctgaccatttttgtagtacctttgccaagttggagaaaaatgtctttgctcacatttctcttggcatccaacatggagaaaaccgttaatcaatatacttaaaaaaagaaatccttaacacaaggagttctttttctcctttgagctggactaaagctcatactgtgaagttatcaggtcacctggctcagctgtttgtttttcataaattctgcaacgcatttgaaaaatcgtatttttcaggctactttgtatgaatggaaggtgacatttctatttcgtctgttataggttcacaggatgagacataagatacaagggcatgctgtttcatttagaatttaaaggagtaaggaagaaagaccccatttaggctaagcaatagaagttgggcctgaagatttctagctatgacacagtttctgtctgcattctaggggtcaccccatattcttctgtttagacctcttcatgttatcagtagagaagtgaagttcataggacttcacaagaatccatttgtgaagatgatagtgatataaccatattgtatacttttttaatcctaggaacaggaactgtgctacatgcttattatctctagaccttaggacaaacctgcaaggaaactgttgttattcccattttacaaaaataagaaaaatgaaactcagattagtaatttgtcagaaatcagcacagatctttctagatccaaagctcatgccctttgcactaagcccctctgtgtctatttagattaccatttagttgtaggaaaatcatcatgtgttgtcagttctttgatttgggatcatatagaagaactagatctttgtcagggactcagagagacagaaaagtaaatctatttttttgaaaaaactaatgggaaagaaaaatcctcttttctttttcacatatgtttttctttcctacctcattctcccttctccttctactgctccagtcctaatttttttaaaggttacctttccagaatcaaaattccatatcaggattatctaaaggcaggatataattttaatgcttattctttgattgctaccctctcatttctggcctccacgaaagggatactgtcagaagcctgagagaatggtacttctctttcatggaggccatttaatttgacaaagggaaaacatgaaactgagaattctatttagagttctgcctggtggtagctgatcactgaaatggagatgccttttgccaaagccgacttttggctactcagacctaacttgcaacagggaaaagtaaccatgtatcttaaaaagccatgattcattctatatttctacctgcaccccatatcatcctcctgggtcttcattgttctctaaaacttccccttcaaagactttacagaggcaagttagttctttgtggacatggtctcaagtaattctttggacatatatagatgaacagtgcggaaagctgtctatgggttgaatatgctatacacattcgccaattgtaagtccagattccatccagtatagaggtacgttcatacttaatcaaagtagctagcctagtttctctacatagtggaaagaggagctgcttgttgccttgtggaattaacatgaccaaagttccatgttcttttgttttattagtgtgtgagagtttagaggattcatggcagggatcttgcttctctcaaagtggatatggaaggcctgggccaggggtataccactgggttgtcagggtgatgtaccagatctcaactgtaccactttgacactgctacctagggttcaaaaaatgctctggttctgtaggtagacacagactttccagggaaagcatggctgacattttagtgactacctccagtgtgctgggcactgtgttgctaaatgcattcccattcaccctcacagtcaatcatgtcaagatggtgtcattgttattccttcttcatagttgaagaagcaggctcagagtgtttaacttgttcaaggtcacatgacaagcaagtggtagacctgggatctgaagctgtttccaaagactgtgttctttctgtgatgttttgctgcctcatggaatcctaaggccatagaggcatcttgtttagttttccacctgatgtcaagtagaaatctgacctaagttagtgcatttgaagtaaaagggcatgttgtgctgctgaaggcaacacatcttagaacagtttataccatcaggaagttcttacctattttaagtctaaatcagtttccctgtaacttctacccttccatttgtcatgcttctaactctagagaccatagagaacaattcccttttcattcgataatctttctgatatcccaagaatattagtcaaggttcattctggagacagaaaccacatgataatttgaacaggaaaaatttaatctaaagaattattaactagtaacaggatttgcctactacagggtaaagagaactctaaaggttacagaaaataaacttgggagagccccttccccagctagatctgagattcacaccttactaatcacatccactggattagtaaagtttactgaggtgccacaggccaaacttgacaagcaggaaacccagtcatgccctcgtatacacacagaattcaacagaaatctgccccaggagtgttattgaacttgctgggaaactggctagggctttagtggagctcacctggaactacccacagggagaattgtggctgagttgctggtggggcatccacataacttgctgggaagcttcctggaggggtgctgttaaattcactgggaagccagttggggtgtgctagaacctcctgggaagctgccccagggaagaggtgctacttacacttgctagagacaagtgcccctgcctgcctgcctgcctgcctgctggccaggcactactggagcaagaagtaaaaaaggcataccagaaccaggaagaaagccacccccatgcgctgcactggcccttcagtgccctgtactgacacagtgtgacgccatgccagttggcaaagaagagatgtttacagggtccagttcagctatcactaacagggcaatgatgactacagttgaaactgagaggcaataaagtgataagtggcacacttagtttctttaagcattctgtagaaagcctggatacagatgcctgcactgtccttgttatttcttctcaactattttctgggcttgttggtacttcttttaatgttgtggtacccaaatctgaacagagtctaactcagcagatttcagagtgtaatctgggtaccctgagcatccctgagatcctttcaggagatccaggacatggaaattattttcataatcactctgagtcattatttctctttcccacttcttttattctctcacaaatgtacagtagagttctccagaatctacaggtcatgagtgacatcatttcccacagctaatggaatgtgtgctcatatattttcatgttttaaaatttcctcagttttaatttttaatacagtaaatagacaatgtgtttgtgtgtgtgtgtgtgtatcctatataaacaaaatctctttgggattttcagtaatttttaagagcatgaagggattctgagaccaaaaattttgaaaaccaccggtctggtaggtagggctataacctccttcattttagatgttacagggcggggtccccaaccctgggccatgaacccgtagccatctgtggcctgttaggaaccaagctgcacagcaggaggtgagtggtgggtaccacctgagttccgcctcctatcagatcagtggcagcattagattctcactcaagcgagaagcctgttgtgaactactcatgcaagggatctaggttgcacgccccttacgagaatctaatgccggatgatctgaggtggagtagtttcatcctaaaaccatccccgcccctccttcccctacagtcatggaaaatttttcttccacaaaactggtccctggtgccaaaaagtttgaggatgactgttataatgtattcatattttataaggatttgggaatggtagatgtatgacagggattttatttatctgaaatagggagtggggatcaagcaagaataaggatgattgctggagaaagtgattgaaccttactagttttgttccagatccagagaaacatgggattctgaagctgcaggtcctttttggtcttttaatgctaaacagacttaggttcaaatactagccttatcatttattttctgtgtatcactgggcaagttaattaacctctctgagccatgaaaatactagtttgtaaataattcctgcctcataaggttgtcaggaggattgaatgaattacagtgcatctgtaaagcatctggcatatattagttgcttaacaaagttccctttctccccttccctctacttattcttatgctgagaagaatggacttgcttaagatcccatagataatgcagaacccaggcctccagtctttcagccatgtgttcatgcattattccaaagatatttttcgattatgtgccaagaatgaaactataactgttgatattgatgaaaaggcagtggcctatagggttatttctttggtcacggattcagcccttccccaaacacactttttggagctgaccattctcttttaggctctgtgccacaggtttattttaagaccgtgaatacagggcctctcacttgcacaggcctcttccaagaccctgggagtgcccccaacaatgtgttctacaaccagttatattacaactatgcagaagtaaaacattttatctgcagtcagttaaggcagcttttctcctactgactttccctctatcatacttcttcttcagtatggtgactttggagtggccaggagcgctttgggacttcaagacccacagaaatgagatttttctacaattacatgatggactttttgaaagcagtatgatacctagctttcctattctcatttgacaaatgtgtaaagaacaaactgccctctgagatctatggacatgggtactgtaccaaagaagtatgaatttcatgctatgctaaatgcaacattttaaaacaaagaacctgtggttaaattacccagttatttcataaagtagaatgggaaaaaaatgtaaggcacgtcatgggttggtgtttcttcagtatactagaaaatcccacataattggacctagaaatttgatatttactttgtaaattggtcatgatgagaaaccaaacctagtgagttgaggggaggggataaagtgctgagttaaggaagctacactcattcaataaaacatactttgatgagtggtggattttagcggcaccaaaagctgtttgactgcatgatggaggtgggcacgtcggggaccttcggcacatgcactatatttcctagcactgctgcaggcaagttttcagctaggatatacttatctgaaagtattttgcagagtatttaccagaggtgggtagagttctgatattaaagtcttgatcctgagaatgaggttatgcagaccttatttctcttcctgtcattgtgaccttggtcgagtcgttttgcttctctgcctctcaattgtgaattgaagccaatttgttcattctagttaggacagtattgagaattagtagtgttacaaggatttagagaggataaatatgtatgtatatagtatgtgtgtatatatgttgtatatatgtgtacgtgcagtatatatattttttattataacaaagatgcatctgtgagaatctcccctgacacagttctacctttggatttgatgagagccgtggatacaagctgattctcccatctcatttgtgatgtcatgcttttactactttatctcctcacaaaagttaggagaatagtaaataccttttctctttttccagattctctctggcccaaaatccgggttccattaaaagttgtgaggactgctgaaaacaagttaagtaaccgtttcttcccttatgatgaaatcgagacagaagctgttctggccattgatgatgatatcattatgctgacctctgacgagctgcaatttggttatgaggtaaggaggttttacacagtgtgtttatatgtttaatattacttcctatgactgcttgtcttttctaaaaaagagtattatatttccttcttaaaagtcagagtttctaaaatcttccagtagagtccaaaaggtgtgcgtaagagtgtgggttatgaagctgttctttgaagcactggagaaaccctattccaaaatggcaactgtgccctccactggttttgggaactcccaaggagagtcccaggggacaatttcaaaagagcatctatagcatttaacaagcacttaattgatgtctccttgaataccacttcccttgactcaagcagctaggcgctgcaacaataaaaacatcaataagtgaagaagctggcgacactgacaaacaaagcagaccctgttgatggctttctttctgagttttaagtggagaggctggctgcctgtctttagggagaaacattccctatcaccgtttattcaatgaggctgatggattaggctgggttcaagggttaagtatggagaccagtaaaggtctccccaggggaaagtgccagagtccaggcctggtgaaaagcaataggaattgatgggccctgtcagggtgtacgtgagatgcatgatgacaacaggcggaggcctgcggctgcgggtaaaagtggtatcagacttaagcatgcagagtgttcaagtcatttagctatagctggctcaggggaaaggggagcaaggtaaccattttctttagctaacttaggatttgttgaatttggggttcttaaatcataaatttttaaaaatgaagctatatttagtacatgtatttattatagaaatacatttttaaacacttaaattgaaggtggattttaaggacaaggaaaaggaatcccctcccccccgacactatcgccaccactaaaaattaaaagctcaagttttcctaggtttttaaaaaaaatgtagcttcatttgagtgtaaaagaaattgttatgaaatagattaatagattgatgtgcgatgccctggatgatgttgttattggccaatgaaaggcatgagagtagctaataaaacatacattcatctttttggatttatttttattcataggagatgacttttacagcacagtgtctagggtgttggatgatatttagtatactattattcctatttttaaaacaaattgcctacttgtttttctagccaagtaatggcaaaaagactaatttttttttttttgcgagtgatttctctcttcattgcatgtaatggcttcaaatgctacccatgtgtttatttttgtggcaaaagagaggtggaaaaaaggaatgttcaaaacgacatgaccaagatggacagagggctgtctcttaagtattttcagttggtctaaaggaagactactaaaagaagggtgggctaaatgtatttctatgatttctttcaaccctgagtttgttttaagcaactaagactatgttaatgcgaggaagttttgcagcacttaaagggactgagctcgaatctttacctctttcctctgattacttgtgtttgattccatattacctctaaagaagtaatcattagaagagtgaaatcaggaagctttcttatctctgttagtcagaatatccagatgctatggaaggaacaactttgataacaaccttgtatatacaacttactatgtttctgtcaacgtcccgagtgtttccatacattacttatgctcttggcccaggcctgcaaagcaggtatgtttttcttattctgtgctgagactaagtaaggttagataacttgcttatagtcacatagctaataagtggaagaattgggatttaaatccgaatttttctgacactgtgctgccttccctgaggattttactgtgagtgacatttgccagagatcagtggtcctcagaagtagtacttacagccatcagcatatcttttgcctgtcacaaaattattttgactctaagacaaacaaatacattttttaggtacccctaccattggtgctttagggcctccgtgcccaaattcctgctctatcactgaccaatttatgatgattgacaggttatttaatctctctggatcatagttcattcttacataaaatggtaatgacaatatctacttcatgaggttattatttgcattggatgaaattacatagtgcctcccacatggaaagtgggattccccagtctaggttgggttcagagcactctgtacctctttgtgagcaaataatggtgaactgtgttgtttgttgccttttttttccttttagaatgtaagcaccaaaaggcagtaagtacacttcctgtgtgatagacagtagattttacactttacagatgccatgttagctgctgctgctgttatcattatgactactgctattttcattattccattcatgattctactatgattcatgaacgagattgttgttttcattattcagaaggaacatttctatcttgaagaagggactcagtttagtgttgaatcaagagacagaagatcatgatgctcctaaatcctgctttttatcccaaagcctagtattttcatgcagaaattgggagcaggcttgattgattaagggaataaataagtaaatatttgcatcctaggggagttatattggatcccagaactactattttgtggtgttatcacagtcccttgggattatatctgtcttgttaatctctactcatccttcaacactcagcttggctgttgctgtctcaaagaagctttcagagaatcctcagtcaggttgggttcagagtactctgtacctctttgtgagcaaataattgtgaactgtgttgttatagtgtctttttttccttctagaatgtaagcaccaaagggcaggaaccatggctgtcttattcattgctatgccctctgtgcctaacccagttcattgcattcagtagttaattcagtaacatttgatgaatgaataaatctcccttaccaacacacgtatgaaagatatagaaaagattattctggcctgtatgcccttccactttactgtgatccataatctggttacatccattttggaaagcagtttggagtttaaaatgttaaacatacatctaccatatgaccagccattcttcccatggggatttaccctagagaaatgacaacaaaagtctgcacaaatatttgtacgctaacattcaaagcagcttttatttgtaataggcaaaaattggagaaaataaaacaatgtctatcaacagttaactggataaacattgtgatacatccatagagtagaatatggctcagtaataagtaagaagtaactattgatacatgcaacaacatggacagttttcaaagtaattatgctaagttaatgaagcaggatgaaaaagagaacatactttatgattccatatatataaaattctggaaagtacaaactaaccctagagatagaaagatcagtggttgcctggaaggtaagtggggagggtcaggctgtaaagggcaggagggacgaataacagaggggtacaaaaaacttttaggggaaatggatatgttcattattttaattggggtaatggttttactggtgtatacagatgccaaaacatgtcaaattatacactttaaataaattatttattgtatatcaactatatttccaaaaagccacaaggacaaggaatgttacttatactctagcagtagcataaaaactgaaatacttgaaaaatacaacaaaatgtgtgccagatatgtttagtgaaacctaaaaaatgttgccgagagaaattgaagaacaacttcataattggaaagatataccatgcttgtggatccaaagactcagtattgttaccatgtaaattcttcccaaattgtatagattcaaaacaatacagtcaaaatcccagaagtctttttgttattgaaattgacaagctaaaactgaaatggaaacacatcagacctgaaaaagtcaaagcaattttttaaaagaagaacaaagttgcaggacttacactccttattttcaaacttgctataaagctacggtaatcaagacgtggtggtattggtataaatttagatatataggacaatgaaacagaataaagagtttagaaatggaccacacatgtatggccttgtacactgtcagtgggaatgtaaattgatacagccattttggaaaagagcatggaggttcctcaaaaaactaaaagtagaactgccatatgatccagcaaccccacttgtgggtatatgtccaaaggaattgaaatcagtatattgaagagatagctgcactctcatattcattacagcattgttcataatagccaagatatggaatcaacctaagtatccataaacagatgagtggataaagaaaatgtgatgcatatgcacaatggaatactattcagcttgaaaaaagaatgaaattttgtcatttgtgacaacgtggatgaatctagaggacattatgctatctagagggcaggcacaaaaagacaaacattgtattatctcactaaatgtagaatctaaaagtctgatctcatagaagtagagagtagaatggtggttaccagaggttggagagaaaggcaggtaaaggggaaatattggtcaaaaggtataaagtttcagttagacaggaggaatagttctggtgatctattcacagtaaggtggctatagttaataataacatatgttatatttcaatattgctagaagagtggattttaaatgtttccaccacaaagaaataagtatgcaaggtgatggattagtctgatttgctcttctacaatgtaaatgtttatggagctatcacattgtaccccacaaatgtatacaattattacttgtcaataagaataacattttttaaaagctgaaagagaataggattaaacagagggggaaaggtagactgagcaaaaattactgcttgaaacattttttaaaagatggtataggctgggcgcagtggctcacacctgtaatcccagcactttgggaggctgagtcaagcggatcacgaggtcaggaatttgagaccagtctggccaacgtgatgaaaccccatctccactaaaaatacaaaaaattagccgggtatggtgatatgagcctgtaatcccagctactcaggaggctgaggcaggagaatcacatgaatctgggaggcagaggttgccgtgagccaagatcgcaccattgcactacagcccgggcgacagtgagagactccgtcttaaaaaaataaaaatataaataaataaataaataaataaataaataaataaataaataaataaatacaggatgatatagaggtacaagatgacacacaaaaaaagtcctcaacatcatagtcactacaacagttttaaaataaaagcacattgagttaccactatatctccactagaatggctataagtaaaattaaaaagaatgacaatactgagtgttggtgaggctgtggagcaacttgaactcatacattactggtgaaaatgtgaactggtacaaccaatttagaaaacagttcggcatatagaacattttttatatgacccagcttccaaaagaaatatatatgtgcagacatatgtctgcataaagacttataagatccctaaactagaaacatcagctggtaatggataaacagaatgtggagtatctatacaggggagtactacacagcaatagaaagaaagaaatggatacatgcagcaacatgaataaatctcagaagtgttatgctaagtgaacaaagtcagatgtaggaggctactgactgtatgactccgtgtatatgaaattctagagtagaaaaaactacattgccaggcctgggggatgggattgaccacaaaaaagcaagaaggagcttttcaggtgatggaaatgttttatattatgatatggtggtggttatatcattatatacacttgtcaacactcaatgaattatacctttaaaattgatagtttttattgtaagtaaactctatttcaaaacttgaaaaaaaaattgtgggatgcagctaaagcagtgcttatgggaaagttatagcattaaatgcttatattataaaaagaagaaaagtctaaaagcagtgaccaaaagttcattccatcttaagaacctagaaaaagaagagtaaattaaactcaaagcaagtagaaggaagaaagctaaattagttaaatgctaaattagtgaagtagaaaacagaccaacagagaaagtgtacagatccagcatctcatagcaatactcagaatgttccaaaattactcatcataccagaaaccaggcaaattgcaacttcaatgagaaaagataattaacagacgccaacaaggtgacacagatgttagaattatctggtaaagatttttaaaaggttatcacaaaaaaagcctctaataagcaattatgactactgtcaaaacaaatggaaaacagaaagtttcagtaaaaagacagaagatataaagaagagctaaatggaaatttcaaaactgattacaatacctaaaattgaaaactcactggatgggctcaataggagaatggagataacaagaaaaaactggagaacttgaagataaatcaataggaattctccagtgtgaacaacagagaagaaatagattggcgaaaaatgaacagagcttcagagacttgtgggacaatcacaaaagatataatatttgtgtcattagaattttagaagaagagaaagaatgtgggactgaagaaatatttgaagaaataatggctaaaaacgtcccaaattagcaagagacataaatgtacagactcaagaagctgaaccaaccaccaacatccaaagaataaatagtataaatttacataaattgtgtaacctgaataaattgtagcaatacttcttatttcaaatagtaattagaaaagaggaaaaataaactggtttatatatccaaatatatatacataaggaaaggagaaaatatgcataggtgccacattctttgcttctgttgcttgatctccagaccataggtgatatttgtaactttcttcttcttcttcttctttttttttgagacggagtctctctgtcgcccaggctgtagtgcagtggcgcaatctcggctcactgcaagctccgcctcccgggttcacgccattcttctgcctcagcctctccgagtagctgggactacaggcgcccaccaccacgcccggctaattttttgtatttttagtagagacggggtttaaccgtgatagccagcatggtctcgatctcctgacctcgtgatccgcccgcctcagcctcccaaagtgctgggactacaagcgtgagccaccatgcccggccgtaacttttttcttctatccattccatgttcccttcgttcccaaccagcagtcttgcatatttactacagacccaatttctttaatgtctctaatacaattcagatttccttcttgtgttggttttgataaattgtattttccagggaatttgttcattttatctaaattacaaaatgtattggtataaagtcattcgtaatattctcttgttgtttaaagcctgtaagatttggaatgatgtactctttttcattcctgatactggcaatttttgttttatgtctttcatgatgaatcttgttggaggtttatccataatcttttcaaagaattgactttttttttttttttaaagacagagggtctcactctgtcacccaggctggtgtgcagaggtgcaattgtagctaactgtaacttcaaattcctgggctcaagtgattctcccacctcagtctccccagttgctaggactacagaattgtcccactatggctaattttattttttggcggggggtgggggcggtagacaagctcctgctatgttgttgtgggctgatcttgaactcctggtttcaagcaatcctcctgcctcggcctcccaaagcactggggttacaggcatgagccactgcacctggcctcaacttttgagttttgttgatttttctgttgtgctttttttgtatttaattactactcctttcttgattaatttctttctctcctttgatgaatttaagttgctgttgttttctagccttttgacttgatagatcaggtcattgatttcaatatttgtttttctaatatatgcatataaagctataaattactcttcaattgctgccttaggtgcatttccagattttgatgtgtcatatttctattgtctttaagctcaaaatattttctgatttccattgtattatcttctttgacacatatttatataaaagtacattgcttacttttgtcagatttttaagttaatagtttttttatggatttctggtttgattctactgtggtcagaaaatatactctacgattttattattttagaatttattgaaactatatggccccataaaaggtctattttggtaaatgttctgtgtgtgattaaaaagagggcgcatatgcacctgtggatttaatgttcttactaggccagttaggtaagtctagctacctcagcacctttagcataatcaaaatatccccttgcttgttctctgaaataagcatctctatttcttcttttttctgtagcctttgtcatttctgtaatagttaaattcattatcctacttaaaattaaaaatggtttaaatacagtatttactatatgagaatcaaagagaaatcatgcagcagacctttttagctgttgccccaaagaatttttaagaggcctggagagagaggagtcttccatttgggaattttttttttttttttttttttgagacggagtctcgctctgtcgcccaggtcggactgcggactgcagtggcgcaatctcggctcactgcaagctccgcttcccgggttcacgccattctcctgcctcaacctcccgagtagctgggactacaggcgcccgccaccgcgcccggctaattttttgtatttttagtagagacggggtttcaccttgttagccaggatggtctcgatctcctgacctcatgatccacccgcctcggtctcccaaagtgctgggattacaggcgtgagccaccgcgcccggccccatttgggaatttttaagagaaggaagccagcaatcccccagcatttagagtggttttactaggtctgcttggatgcagaagaatagaccaagtgacttcctgagatccctttggttgtaatgattctaagccatcagaagtacaggcagatctgtaaggtgtgattccgtatggaaaagtaccaaacttcaatgcataaaaaatgtcagattccttcactttcttgcggaacacagagagattgcatgtgttaagataagggtatatttgcaggtgatagccaacagcatgttgaaattgaagaaagaaaacaagaagttattttaatggaggagagagagccgaatatggtgaaccagatcttatttcgttcaggattctaatgatgcctgtactgaggaataacgtgcagattcaagccctagacttccagcatgtttttcacaaatgcaaaggcatccgaaggcagtgcttatgttaaagggttggaagaattgatttacagagaccattttaaagcaactggctccaggtcttgctaaaggaacataaagcagtgattaaaggccagttcacagattgcacttccgagagctatgagagaaacttgggcctagtgtaagagggaagagatgtaagataaatgatgagggagatctacctggatattagcttgaaaattgatagtgcactctagaatcactctccaggagaaagttattagagccacaacagtcctttctccatcctttgtcaaatcattgcacaaatagatgatgccaatacactatactgggatacacaaacaaggctgcggcacactagatgtgacccacccgaggcctcactgctgatgggtgaggattagctctttacatgagcattacccattcatagcaccccagtcagaaagctctgtttaaaagaaacacagtgtcagaatgtgaagatcttaggatcatcctgtcacttcaggctttattgctgagaaaactgaagtgcacagaggttaagttacttctttggggtgttaaatgtacattgaatataatccttaaaggcacaccatagcaagttcttgggaatgaaaggctagaccatgtaggaaagcctgttttcttccagtgtctgtgacttgagcacacagacatttggaccgaataccgggtatcattatttatttaattggaagaaaacagaggggttatttgtgtgtttatatgggtcgtatttcctattggaaggcaaagcgctttgggaaatgttccattctctctccagccctgaaatcaggagctaggaatgatcttctctggccctgtgtgtttctgacttgtttgacaagctctagtgagctaccagatgtggaaattcttttcagcctgggataatttatttatctgtttatgtattttactaggaaagtatctattgagttcttgatactcatttgcgagggactcctaggggaacagtagcagtgtatagtgttacttgaatgtttgattttttttttccaagtctgtctgcttttatttcagatctgagagctgggaaataaaaagcaacttattcctcctcccctcctccatctttgagagagacagtttaaaacatgtggcagaaaatgagccatggagacttggctgaatgtatgaatctgtgaatttattttttctttcattctttgatcctcatttccaaccataaaaattactagtagcacttaagtgttgaacattttcacctgagagatgtgaaatgctcttggctaagaatattcattataaagtcagtgaatgaattcctattcatgtgagaatacgagttcaccagagcaactgtgtgttgttaggcacacaaaatattgatgctctcccttttacaacctgggcatcttgtaggtggtagcactggtaaaacctcctgagtgctaatacattgtgagaatttatttgtattactttgttcacaacttcctaaggtaataacaagtacatactctcaaagaaccatggaagaccgcaaaatagcatggaatgccccagttttttcatgagaacataaaaccatctttgagtggggtttcctgatgcaggaagcaccaagaagaaagacaccaaaggagaatgagcttggtgtgtgtggtagtacaggggacccatcatcatagcggtgtggcagagtaggaattttgttttggtgagcagtggaagctaggctgcttagggtaatagagggccagcggaggtgcaggctgagaggtcaactgaaaagtttaatgtgacaggcagaaaagaggtgttgtaggtttttagagaagtatatggtaaaagccatcagatcacaagatgacttagaggttgcagagactggagattgtgctagtggaaaatctatagacttagtgtttgaatggattgaagaaccaaggagaaggaaaagaccagcttactccatagctcagatttaattagtgatgagggggcctcactaattggagaattccagagctgagatgctgtataacgtttatattttaaacagaattagtaaaacttatggctatctatatgtgtattcaaggagagtaagagattatagaatctgcaattcttttttttttttttttttttttgagatggagtctcactctgttgtccaggctggaatgcagtggcacagtcttggctcactgcaacctctgcctcctgggttcaagtgattctcctgccccagcctcccgagtagctgggattacaggaacctgccaccatgcccagctgatttttttgtatttttactagagatggggttttcaccatgttggccaggctggtctcaaactcctgacctcagatgatctgcccgcctcggcctcccaaagtgctgggcctacaggtgtgagccactgcacccggcctagaatctgcaattctaaataaatgatcccactttttctcttctcactacaacaattgaaaaatagaaatgacatatcctagaattagacttcataacctcctttaaaaactagcagatgactgagcacagtgacccattcctgtaattcctacactttgggaacctgaggtgagagaatggcttgaggccaggagttcaagaccagcctgaacaacatagtgagacctcatctctactaaaaattaaattaaaaaaaaaaaaattaaccaagtgtggtggcgctcacctgtagtcccagctactcaggaggctgagtgaggtgggagaatcacttgagtctaggatcgtgccactgcactccagcctgggcaacaaagtgagaccctgtctcaaaaaaataaataattaaaaataaaaatgcaaaacaagtcttggacatgcttctcacaggcttgtgcttatgatccttctgataagaaattaactgcttacctccctagatttacattccagaatcttaaatatgaaaatgtgcctcagtctgttgggaatccaggagggtctctgcagaagggtttttctttatggcacatggaacctcctatctcatcttgccatggatgggttctaggaaaggctcaccctttgagttcatcttggacagagagaaactcggttcttacttacatagctgaggctgataaaaaagggggcatccctaacagaggaaccataaaacaaagtacatacctgcagtgcatccacttccaataaatatacttattgaaagtatttcagctttcagtgggaactagcaccttagattttcattccttgacctcttgtgtgactcagatcgttgagcctaagtctgacctagtgatgactgggaagattaggaattaaagtctttctttctcttatctggatggtggcctgtatccagagtgcagtgtggatccagtctagtagtcagcttgcacggctgctggtgtgttgctggtgctggaattcacagtgagccaggcctggttttggtgtgcacaaggtcaaaccttgccagagctgcactggatcaacttttgtgctaggtctgacactaaagctttacagtgtaactaggaccagtttgccaaagttgagcttttagaaaaccataatttttttaggcctgttgtgtaccctgttctttaagttgatgggtgtgagctgtctttgagccttgtgtatatatctgagtaagcaacagttcccccgagtacctttccttagcctggccataatgtcagtacagtattgaaaagagcatatctctgtctgttacctccatttttcactttttggaagtacctgaagggttgccattatagagactattgtctttagaagagaatgggccacaaacagctcatttctgtgagtgttcccacctgtcaggtacagttagagcttcccaaaagagacaaatggaagactgtggtcagaggtgagtcattctttcttagaggatcatctccctggagtatttttcacattgcttcaggctccctgtttttcagcctgtaggagaactaaataatctattaggtctgtcctatctccagcttgcattgatttacacccccaagactcacagggacctggagagaaaatagttcatgtgtgccacggctgcagcaagtgctgctgaaagaagatcccaagtagtgggccagaagcccagggaggtgctgaaggaagccgcagtaaagcctgacctctcagagcttctctaaagcacccagtccccattggagaacaagtcaaacaaatgttaagggaaggaaatcaaatatgtttgctgaacattgaaataacatctgatcattgaaaaaaagcacctagttgggaattacaagagagtggcacttttttcttccccactgagcaaattaaaacaagttcagaatttgtttatatagccattaatgaaacatccaatgtagaactagcagcctccctgccccacagaggagggcacatactgcttgctggcacatctgcccatctgagggtctctcctcctcgaagacccccattccaaataagcccattccattggttttagtatgtgccaagcagccctagtgaggaaagagccctgcagacctttccatggccagcgctgtgtgttctgcaccctcacctcaccccaggatctttcctatctgcagcaccatggaggccacctggtttcgtatctctgcttccaaactagtgctcataatatgagatcgttattttaaagaggtgttggtacatttgatggtttaaagaatatgtactttccctccccctgttcaaaatgagatatctgcaatgatattccaaccctgaaaggatccatatgtttgagggttattgttttaaaagctgcctgctgtctcattgggattgattacaggggagctttggctgcttcaggaattcagagcttcagaatttggcttatggttttgggatgtggggaatttgtcttcatgggctgtttatctgccttaattgtgatagagatgctccaaggagatgtgtgggcaggattgggcccagggccagggtaaatcagagcagccccaggcctgaactccccagttcactcaagacggcagtgtatgtagctttcggaggaaagctctatcatttctcctgaatatgaagctgcacccattcattgcaaaattgtacaactgcctgcaaaatcgtgagtttcaggcagtggttggtgattgctattgcattagacatagtgattccacatttggggagaataaagagaaagaaaacttgaaggatcagagtagtcccagaccttggaaatgtcacaactgtgaaacaagtctctagaaagcaagataaactaatcagtgtgatatttacagctcatctctcgatcatatttatttcttggtgcatgaaaattggttcctagggttcacattaatcatgatgaaatatatttactactgtctgttggctggtttagatcaagagttggcaaccattactagtaatatttctaggttcccaaccagcatttaggctgaagatttcaggggttgggtggaggtcatgaccacatgttgacactctgtgcttggagagggaaggaagaaactgacttctcacaaccacggccactaaatatatccacagcagagatctgggcttgattgaaagcctcttctccagtgtggtccattcatgcaagaattgtatctgccttgtttaccactgtatgcctaaatgcttgacacatagtagctgctcaataaatatttattgaattgaatgtgtttggacattgaatttatatatacttcctgtcagtagaattgtaaggggttgttcaaagtatgattccatattccatattcagtggaaaagtcctggtcttttccttgctgactttttcaacaaatggtgctgaaagattggacatccatgggcaaaaatttaaccttggcctggacctcacactacatgcaaaaattaactgaaagtgaatcagatttaaatgtaaaacatgaaaccataaaacttttaggaaaaaaggagaaagtcttcagactctagggctaggcaaagagttcttagatatgacaccaaaagcatgatccataaaaaaaaaaattgaccaatgagacctcatcaaaatgtaaaacttttgctctgtcaaagaccttgtgaagaggacaaaaagacaagctatatacttggagataatatttgcaaaccacatatccaacaaagggctaaacatctagaatatgttttttaaaactctcaaaactcaacaatgaaaaaacaaataatccagttagaaaatgggcaaaggccatgaacagaccttgcactgaagaggatatacaggtggcaaataagatgttcagtatcattaactattatggaaatgcaaaataaaactgcaatgagatatcattacacacctataagaatggctaaagttaaccaaaaaaatacaaacagcaaatgccaatgagaatacagaaaaactggaccactcatatattgtttttggaaatataaaatggtatagccactctgaaaaatagttttggtagtttcttataaaattaaacatgcaactaccataggactcagcaattacacatttgggcatttatcccagaggaatgataatttatgctcacatgaaaacctatatgtgaatgtttgtagcagctttatttgtaattgccaaaacctgaaatcagcccaggcatccttcagtggataaatggttaagcagactatggcacatgcataccatggtatattattcatccataaaaagagcaaactactgatacacacaacagcttggatgattctccagggaattatgctgagtgaaaaaagccagtccaaaaaggtcacatactgtgtgattccatttatataacctccttgaaatgacaaaattatagaaatggaggacagatgggtgcttgccaggagtcagggatagggagggagacagttgtgtgtcttttttttttttttttgtgacggagtctcgctctgtcgcctggcgacagagtgtagtggcgtgatctccgcttactgcaagctccgcctcctgggttcacgccattcccctgcctcagcctccctagtagctgggactataggcacccgccactaggcccggctaatttttttgaattttcagtagagacggggtttcaccgtgttacccaggatagtctcgatctcctgaccttgtgatccacccgcctcggccttccaaagtgctaggattacatgagtgagccactgcacctggcccgacaattgtgtcttaaaagttcaacaggagggacccttgtggctgtggaaatgctctgtaccttgattctatcaatgtcaatttcatgttgtgatgtcatacaatagttttgcaagatgttgggggaaactgggtaaagcgtatacaggctctctgcattatttcttacaactacatgtgaatctataattatctcaaactaaaatgtttaatttaaaaaatattgggagcttagtatctgtgagtcagatgcataatgaattaataaaataagaacactcaaatctctccgtccctaaacttgtatgactttagcttgatgttggattgccttttctgaatcttaatatcaaaattaagattttaaaactagatggagtatatctggagatctatctatctatatctatatctatatttattagatatatgtgtacatatattagatatatgtgtttatatttatattgaataatattgaggacatcatctgttatgatactttggactttagttttgccttttattataagtgaccccaaatcattttttggaaatagatgagatataaataaataagtaatctgaaaaagtccctctgctgcttgattctccaccaagagattatgggatttaagcacacatatagggcactaggatgaaataacgcattaaataatgttttgggaagcagatttatgctttgaagccagccagaattactgagtttgtggtcactgtcatttcgtacctttgcacagtaataagaaaacaaaggggatatgctgtagtgtccctgactgcaagtgatggaagtcagcagggcagctacttgaagtaagcagagtttattttctccttggtggacagagctaatatctttgatccctggtcatttaagttgagcctcaccaaaatcaacttgaaattttgaaggcccaataatagttgtttataagaaactgaagtctctgtttccactggttgtgtaggatttaaagagaatcatcatttggcttatgatgactattctccttttaacttcattaagcaatctcctgagattagacttagaaatagtatgacccacactggagctgaggttatggaaataaaagtgatttcatctttactgggtcttagggagcacagaattagaaaacccacgacctgatcctgacccatctcttcctcctcctcccatcccctcaaactctcatctctccttcccttcttattatctcccaagagattcattgcctcatgaaaaatagtatttggggttaatctttcatttagctgctttttgcttgtgtttccttctctgcctcagagcctcacagattacgaggttccagtaggccctcagatgtcagatgtggagtctcactagtttgctgcacagctgactggagttctttcttttaatggtgtgagcatatggctttctttgctagatggaaaccacattcacaaagagcctgtagcttttagaaatgaagactgatgggagcaaagggttttttcgtgttccctgcctcctctccctacctggttctattctgaatctggtcattcagcaggcacctgtgaccctcttcatatctgccactggcaccacagagctgaagaacattgaccctgaatgtcgtttttgacatcataatctgacttctttgttttcaggtgaggggctgagcttggggacaataaggtgctttttagaattagcatagtaggaagtcagatgacttcatgaatagaagattggactgggagttcgggccaatttagacttgacccagcactgtaaccttgggagaaccatgtctctccaggtctcagttttctcatctgtgcaatgagggaactggaccaagtcacctctgccttctacatgatctctgaggttgcagatctctgagatagcttggacagtggtcatcagctccaactgccaaagtgtgagtcttcttattatccacagaaggctcatggttatgctgtccagtgagctggtacagatacaaggatgaggcacatgtttaaagacactttctttggcagtatcttcctagtagtggtaattattgaaagatttaatggcacagatttttttatcaactatggccaaccccagtctgtctctttgccatcttcatggcacctggccttaaaaaataacttgcaaagaatggagatcaggtgccccagtaccaaggtaccaacctctagccagactggagcaaatgggaatgctgcccaaaccccagaagcctgcccatgtaattggttttcctgcgtggcttattttaagcaagctcctgcctggggttgggaaggtctctcggacagactaaagtgatctcacaggtaaatcttaatccataatgcagtttgtccatgtgtttgtcaaaactagtcagcattagggaactctacatgacaacttctgggctccttggctgtagatggctagtatcagcattgaattgtgtcccaggagtgaatgaaggctccttggcttttctcaaagcacatccttgacaaaaactgccaactaccactgtagttaaaagcataagctgaaaatgaaggcagtcagtccctccattccacttcatttcaggaaattccaaaaataaaaggtgagctttgttcccagagggctgagagtgaatcctataactggctcctctgtggaaaccagctcggaattggaagccagccagctgcccctttcccatctgggcagcatgcaagacgaagcctgaagggaagaagggccactaattcaaagatgcttttgcatattggattccttgtgctctgtcttggctgacccagccatgtgacagcaaggtttgagctggttcatagagctctgttgcactttaatggttaaggattgaccaaactcaggcagtgtgtgcaaggaaggaaatgaagccattgccaaatttgatgtgccttggatctatagactgcacccccaattccatttctctcactacttcttagtctgtctcttggttcatgagtcctgatacattgctcacccagtagcaatatccctgtggaactgtgcctttgacagtgtgatgactgtagaagccacttcagagtggcttttctcctagtgctggcccgtgatttcataactgaacgtcccagatgggcaccacctgttgttacaccttcccccttctccccctagtctgtttccggaatctgactgcggttagcacacaccctgagtttaaaatgcactctctaagctggcttagaaggtagtgcattaacttctttttaggaccatttattgggtacttctatgtgtatggcattttaaacaaagttagataatgcagcccatgctgtttagaaacttacaacttgaaacagatcacaattggtgggttagttccctgggaacaggtcagtgaggaggaagataaaaaatctcagctgttaaaggacatcagaattcacttaatccaatcccttattttatagatggcaaaatggaagcaagacaccttgaataggtcagttgcacaatgcactagtggcagagcttcctggacctactttaaccatgtgcctctggtccactttctataggatgtgagactcaatctaggctgccccctgtgggcttttacacaaaggtagaagatatttgtttgatcctatctatagtaatgggacacgacaaaagacctcaggaggctcaagaaagaagaacttggaaaatggccaagtaagcatagctgagaatctagagagcagaacatttccataatcaggtaagaggtgttgaggaccaacaggtaagaggtgttgaggatccttcactagaatgtaagctccttgggagaagtctccttgaataccttgtccatcactttaaccccagtacctggaagagtgtccagcataaaggttgggttaataaacatctcaagtctgatggaagcctatgaatgcttactatgcaacttcacacaatccttacaacagccctatgatgtaaatataaaaattagaatggaaagaaacagttggaggacgttcttacattgttacaatccccatttgactagtggtgtgggatagccacaaatggaaggactatccaaattattgctaagtccctaacttaggcatagagttttttataacagagataggcttctgtccccaaagatgcgtgcaatttaaaatagatgggggcactatatatatggaggatttcaacagtatagacaatttaatattgactttgtgaataatataactgtggaagcactgttactggaactccagggatattctgtgaagtttcaaatgcccacaccacaatatataaaggcatttggtagtaatgacaaaaggcttacccagagcatttccccaaggtaaaaggaaaaaagttgaattagagtaggggtgggtagccatgaagagacagggtagagtttgagctcttgctcgtctggctgggaaaatgctttactgtatacataatcgacttcgtactacactagggctcaattagagagggcccatcccattctgtttcactccgttttgatcctgtagtcagctgcagagttatagattaagtgacaaggatggtatcttgattgtatccagctgcttggaatcagtcaagggctgagaggccccgcatgaggaacagcgctcactataaaggctccaaagcaacctgaaattcaggacacctctgatgccttttagagcagcatagtttagtatctgacccattgtcaccaaattaagtccctgagaggagtctgataagtgatttcagccaacagtaagaggaccgaaatcttaacagcattggacttgacaactgagccaataatagtaataatgtaattattatggctgcaaaagtggggcttgtaaagaagaatccctagggaaagcgatttgaacttttcttagcatggaggagagagctgtgttgactcaaagtaaacagggggagaaaagcaacttccatcttcagcagaagtgccaactgaattggatgccccctccccatgccctactccttttctttcactttggcatccctggtgtttagttatgtgtgcttggggcccttcggaaatctctttaaccccatgaatcagtgatcatggcattggtgtgacttgaacaggcaggtgcttggtgctgagaaaaggaagctggcagcacatttcatggcatctgcccaggcccacaaaacaaacagaagttatggctcacatactgtgttgctgctctgggctctataaaactgtaatagtatcatattattttaatctgctgaaatacaaatcccagagtagagagaacacagcagcagcattacacgtctgagaaaatgtttgacatggattcatttgtctgcagctattatgacgatgcctgcggtcgattagctctgttggttacaacacagtgttaatgaagccaaggttgtgggtttgagagccctgttaggtgagctggtttcacacaaatgaaagctcttttcatgatcccagaccacgcccaagacctaggtcagacattccataaaaacacggagatggtcacagtgaggactgggcaagacagtgcagtgtctcaccaaaaatgcccctttacctgcttctggaaaaacaagtcacaacatgtgctttagtggggaattaggactgtggtcttcacacagaatggatatcacgttattattcatggtaactgctggtcagtactgctgcaggcttccttcctgaattaaggaatatactggctctggtaaatattttctctgaagaaaagagaaggatttttggtccccttcattcttggctttttactcactgagattctgcccattcgtgtgttagacaactgtgtgtggaatgttgttgcataccaggcactgttctttgtgcgtggaataccacagtgtataaaacagtctctgtcctctttgagtttaaattctgcaagaggaaaatacataataaacaataaataaccaatataatggtgcaagtgaaagtttggtaaagaaaaggatgaggttggaggggtgtagcgaggagtggctggttgcgggtgctgtttgcttcagcaaggaaggttcgagaagccctctcaaagtagttgacatttaaacagggacctgacagatgagaaggacccaagcctttggaagagctggaagaacactccagccagaagaaacagcaagtgcagagggcttgaggtctagtggtggctgaagaacagaagggccactggagagtgaggggacatggtgagagaagaggtgaagagtggatgggccctctgtgacatgtgaaggagttcggatattattctcagtgcagtaggaagccattttgttttgttttgagggcgggacctttctttaaatattttgggagcgatattatgggttgaattgttgaagtcctgatcttcagtacctcaaaatgtgactttatttggaaatggggtattttcagaggttaatcaagttaaaatgttgtcagggtgacccctaattcacagactgatgtccttatcgaaaggggaaatttagacacagagatagacttgcacaggggggaagatggccttgtgaagatggagggttggagtgaggcatctacaagccaggcaatgccagagattgacagccagctaccagaagctaggaagaggcaaggaaacatttcccgatatgtttcagtgggagcatggccttaataacgccttgctttcagatttctaacctctagaacttgagactagtttctgatctaagccccccaatttgtggttctttgttaacagcaaccctaggaaactgaaaagggcatagggtccaaacacactggctctgccctagggaatggcatgaagtgtcctttctggactcagcaacacttgtgtgttggggaagcctctagttgctctggcatatgatcatatgacttttatatatatttagggaaatcgatgatgaaaataactatattaaaatagatataaaataggatagaatgcactagttgaattaccctgtgcagaataccctaatattcttttaggaatggtccttttagggatgctgtgcaaatgatgctttggaagggcaagaatggcacgaaggagacaagttagaaggctagcacagtaatcttggtgatagatcgtggtggtttgggctagagggaatggcactagaggtggtaagagatagaagaagagccagcagtactcgctaatggattgaacatgaggaaaggaaggaataaagactgagtcttagcttttgggtttgagcaactggccggatgatttattgagatggagaagattgagagaatgacttgtctagggataaggaatcaagacttatgttttggacgtgttaggtttgtttatccaggtggagatattaactaagtggttggctatcttaggaacattcggggctaaacataaatttagaggtcaccagattattgatgatatttaaagtgattgaaactagatgagactacttaaagaaagagtttgaagaagagaatagagcctaggaccgaattctcagaagtctggtgatggttgaggaactagcaacagagactgagaagaagcaccaagactagccaacaaattgttatactcattcatggtatggatcttttcaaggttagactaaattatacagaaacacatgggagaaggtactggaagttcctcatccccagtatacccaattctgcttaatccaacaaagctcttatgtaaggacctttccagatttggaaagcaagtatttgttttcattgttttacagattacagaatcagacagcccttctatcctttaggcttccagtaggtcataagaatggtgtatgctcaagagaaatagatgcttttttttaataagaaatgggactttatcataagttttcataatcaccaatttaatacaaatcagggcagttgagttgcagggttccatttatccttcattttgtgaattcattaagaatggaacctatttcattaatcatatgttaagagattgcctaccttggcccaactcagtaagctattacccccacattaattgaaattcccaagcatatacaagaagattgggaggaagtcagaatcagcatctgtctttgagttttggcagaataactaacacctgtttgatggaacatctccagaatcccattatgaccttcttaggttatgatggtttgaacctaggaagtctgttgatacctgtttggataactcagcactgaatggttgctgtctgaattgggacttgattgttattatgtgtctgtccttaggtctggcgggaatttcctgaccggttggtgggttacccgggtcgtctgcatctctgggaccatgagatgaataagtggaagtatgagtctgagtggacgaatgaagtgtccatggtgctcactggggcagctttttatcacaaggtaagggggcgcagtcctggcaaggtgacaaaactgagagaatgatacacattttatttgacccaatttaatttttcatacctgccaagagggcttagaaaagccatattgtgtgacagtattttacaaataaagctatcctttttctaattataaaagtaatgcacgctcatagtagaaaatatgaaaatagaatgaagaaaagttacttgtaatcctgtcacttcgagataaccattttatcattcaggtgctatttccagcttgccgtttatttatttacttacttgtatgtatacacagacagttgtaaatattctcattagcctgctttttcatggattgtattgtgagccttttctcatgtcattgacatttcttcataaacagttacttgttagcataattaagataccattatcttaatgttttagaagtcatgtataactattttgctatcgtggatattactttctaaatttttgctattttaaataacgcttaatatctaatgttagtgatagatgtccattttcataactgtttgtactcatgaccattgtgatagattcctagaaatagaattattatatcaaagggcatgaatattttgggttttttaagatgtatgtacatacatgtatatatacacatatacatatatatgttgtgaatattctaagcatatatatgttgtgtatgtatacgtgtgtgtgtgtctgttggtttcaggattgtttgtgcaaatttacactcccaccagcaaaatataaaactgttttaccatgccttttcttgcatgaaatatgattaatagaaaagaaatgagcaattttgataagtaaaagtgaattttattgttttaactttgatttgattactagtaagactgaaattccttttgtgtatttattagctttttgtacttcctctcttctgggaatcatcacttcgtgtttttgactctttttttattagggagagattggggaatatgcatttgattttagaatattcagttcaatagtagaatgctccctgggagtatatggtttaattaaacaatcataacttgtctgttgtcagcagtagcataaagaactgatgtcgggagaaaggtctgttcagctcaacacagttaatttaatttagctgtattcatatcgattgtttgttgttagctcagcactactgccctcatatttttcaggtctctagatccagaaatgggtttttttattttgtaataagcaaacaaaaaaacccaaaaactaaggtttacaattcatgggatttacagtagtagactatgtatgctttattttttttgacccaataatttctacactatttcatatatatggtagttttagaattgcctcatttttcttctactttaaaaagcacacactttggtagaaaatgaccatattgaacatgcttggtcacttgaccaaaagcattctaatgcctccttttacccttcctattaatacagccttgtgattaatcttatgagagaaagcttgtccccatgccttggctatgctgccccttatttatcagctaaagggaactgctatttttgaatatttcttctttctgtctcacttgacagtattttaattacctgtatacctacaaaatgcctggggatatcaagaactgggtagatgctcatatgaactgtgaagatattgccatgaacttcctggtggccaacgtcacgggaaaagcagttatcaaggtaggaggctctgccactcacttgctttgtgatcttgggcaaatatctattatctgagcctaggaagttcttgtaactataaattaaatataggactagataaactttaagctctattttagtttaaggttctatgattgatgcggtcacattgggaaattgaagctaggctttgacaatttaaacatattttctttttttatacagtttctttagttgcagtttttaaccttcagtatcagaataaaggctatgatgatcagtctataaatcaaaaaattatattctcaaagctgatatgggttctagttcttttagttaaaggatgtagtttaaatttttcttaaggtagctggttttttttttaatagatgttgagaaaatagtacacctcatacagttatgtaactgtagctgtcctaaacacaacgaatttaattgcttttaaatatcaattaccagtttttaaaagtacctttcccataacatattaaaagctgagaatacacaaagatcctatgggaggcttttgtatctgtaaaagatgcctgtttattcctgaaatttagacattgctcaaataagatccctagatatgtagagaaggtacacttctttatatgagtagaatcatcttggtcttttttgcttctagattagaattttgtgtgttaaaatgggcaatgccaggttccctagcaatctgcctagaaagccaaattcctaggtgagcttatgctggaagcatggtacagcattatccattgattccttatgctattaattgataagagaagccagattaaaccaaagtgtatagggaataggaaaaatcactatctgtgctcaccaaacttgccccagttcacaccctgtcccccagctctctaaataactcagtgaacagctgaccacaaaaaaaattaaataacataaattgtgagagttgttttaaagggacccttcccatccccaaatttgctttttttttttttttttttttttttggtgagactgagtcttgctctgtcaccaggctggagtgcagtggcacagtctcggctcactgcagcctctgcctcctgggttcaagcaattcacaattctcctgcctcagcctcctgagtagctgggactacaggtgcacgccgccatgtccggctaattttttttttgtattttagtagagacggcatttcaccatgttgcccaggctggtcttgaactcctgagctcaggcagtccacccgcttcggcctcccaaagtgctaagattacaggtgtgagccactgtgcctggccccaaatttgctttttaacatgcttcaacatgtttttagctgtggctgcttactctggacagtaatgcccagtgtctctatgcttcttagcctagacttagttatctagctttctttcccttccatctcttcactgtttatttatcttcactaggttgggatagcagcttcccctgagtttgctagggagatcgctagttaaggtttgagagtgtagtggggagtcagggaaaaagattcagagtatgagggacgattcaatttttttcttgactcaagggaattgcaaaatagcttggcatcctcaagagcatggtgctgctcatagcatttgccattagctggaaagaggagaaagagcgcctgttggaactaaggttacggtgaaagttatgggaagctgtatttcatcgcccttatggctacaagaacaaatggtgtttatacaaggaccttggcagtgagaaaacagtcattaaacaggaattaaggagcttgtcatcaccacttctttccagttacagaaggcaaaagccctccaagccttttttattgggcccttgtgagttctgccgttggctgagccagacagagttgaatggaggaatggcgaggtgtgtgtgtgtgtgtgtgcacgcgcatgcaacatctcagcttacaacacaaaagaatgcagtgtggtgtcacaagcatgattttattgtccttgacactgacagccaggtatgtttttgtcctcctctggcaggtaaccccacgaaagaaattcaagtgtcctgagtgcacagccatagatgggctttcactagaccaaacacacatggtggagaggtaagtgagcctccaaccaaaagtgcgccttagcctctgatctctatttcctgccttaggcctgtttatggggctttgttggagatataaggacagcagctggtagccatagtcacctccatgtgcactgtgggaattgggttagttcaagcccaggtcacccaaagaattaatttggaatgctactcactcaatttgtaatggctggaagggtcttaaaaatatagtgggccttaagctccagaagccaaattctccatgtggactaagcagttaaccatctacagtcattgagtggaagctagttaattccaaggaaatactggattatttttcagggtaatagctccacgttatagtaaaagcttgattagaaagaattaaaccaaacccaccagagacaaattacctttgctgacactatggaaatgcctgccaagaacaggatcgaaagcaaagccctcatattacagacagaggggcaagacagctctgaaatactctctttatttcgattcaagtcagtttctcaacaagcacacctttgtgtggaatgtaatcctaggccttgtaggtaagaattaaaagagtgggagatgtatgtcttccgttaagactatactagacctaagagttctcacttgtgccccaaaagtccccaagctttgaagtgcctgaatcaagcctagtactttcagaagacaattatttatacaagacagcaaactctgacatcccagtagtgcttgtcaggggaccaaaatgcactcagataaggatatagtagccttttagaatgaaatatctagttcagatttcacagatctcatatgcctctgcttgcagaattcatttctgaaatctgtcagctatattagaattcttcaagcctagagaatttttgtgtgtgtgtgcagaaagttgtttcagttggcctggcttctataatgttttactctctaaataacttctttatctttttcatgtataaacattacccagatgacatgacctttaccagctgttgatgtgaaataatatattatcactggttgatgtgaaataatatattatcactggtatcataagtatttcacagttaagggtagtgacatacactgtcgtagctcctttggaagagaccccaattgaacttctattggagtacaagaaattgttatttaaacctaccccattgtctgtggttggggaaaattcataacagtaagctaagtggtcattaatagggctgagttaaaatggtgtatcggatatatggtccaggaaaggaagtataggaagaaaagttgacctgatggtggccttgaagttcatgctgaggctaaacaactcctctagcactactgagatcttaacaaatgtaaagaggtttaaaatgcagtgagagccaggtgtggtggctcactcctgtaatcccagcactttgggttaccaaggctggtggatcacctgaggtcaggagttcaagaccaggctgaccaacatggtgaaaccccgtctctacttaaaaaaaaaaaaaaaaaaaaaaaaaaaacatacaaagttagctgggtgtggtggcgcatgcctgtaatctcagctacttgggaggctgaggcaggagaatcacttgaatctgggaggtggagtttgcagtgagctgagatcgtgccattgcactccagcctgggcaacaagagtgaaactccatctcaaaagaaaaaaatgcagtagggagatttaatttagatataattattattaaacactggagtgagtaactaagggagatatggaggcttcctctttggaagatcttttttattattattattaagagaaaggatcttgctctgttgtgtggtgatacaatcatggctcactacaaccttgaactcctaggctcaagtggtcctctcatctcagccacctgagtagctgggactacaggtgcgtgccaccacgctaactagttcttaaattttttgtagagacagagtctcaacatgttactcagcctggtcttgaactcctggcctcaaggtatcctctcgcctggggctcccaaagtgctgggattataggcatgataggatatgttatgatatgtaggatgtatagttaggaggagatgctgatggagggattggagcgaactgttggacttttaacagtgtcaaggaccttaacagtgttacatgtatatgtaacaatgcaatttgtgatgagcgccctgagagaggctcaaagggctgtaactgatcaggtgaaagagaagtaactttttgctaggttcattgttaagaataactttctaaaagaggtgacacttgaagtgatccttcaaaaatcactaggatcccaactagtaaaaccctgggccagaatcagagactctcagcagtggaaactgaatggtttgtcaagggtgcctgatcagcaagttcaacaagaagaagcccaatttggagagcttagaatgctggcctattagtgctggactccaaaaggctttgaatccccaaataaggagctagatttttttttccttcaggctctggtaagctatagaattttcgaacacgagactagctggatcaaagtattgctttgagattaatttggaagtaatgcacagggtggaatgaagagtgaagaggttggagaaaagactagttagaacctttaactaagctgcatgtggaaaggaaggaacaaattaaattacaagagatttttttttcccaaagggagatgtacctgaacttggtttccaactgaagagatgtggggaggctatgaagaaggagttgacaaacatacctttaagattttgagtggtagtagtaccttcagcagtgtaataggtttaggaggagatgctgattaggggagagattagagtgaactgctggacctcagcagtgtcgttaatggggacaggaggtgatgttaatcaggggtgaagttggagaataataagatatgtgatttgggggtctttccctctgtatatacttttttttttttttttttgagacatagtctcactctcttgccaggctggagttcagtggtgcaatctcggctcactgtaacctccgcctcccaggttcaagtgattctcctgcctccacctcccgagcagctgggactacaggcacgtggcaccgtgcccggctaattttttgtatttttgtagagacagggtttcaccatgttggccaggatggtcttgatctcctgacctcaggatccgcccacctcggcctcccaaagtgctgggattacaggcatgaaccaccctgcctggcttttttttttttttttttttttttttggaagaccagagttttattattactcaaatcagtctctgtatatacttttatgtatgtatatcaagatatagatatgtggaactagaatttcagaaagaactttaaaaaaaaatgttgagcccagtcatccctcggtatccacaggggatttgtcccaggacctctggaggataccaatcttcacgcatgcgcaagtccattatataaaatggcctaggatttgcatataaccttcgcatatccttctttatagtttaaatcatctctagattacttacaatccctaatacaacataaatgctatgtaaatagttgttacatggcattgtttagggaaaaatgacatgaaaaaactctgtacatgtttagtatagatgcagtttttttccagatatctttgatccaaggttggttgaatctacaaacatggaacccttggatatggatggctaactgtatttggcagtcatctgtccagagacagcagttgactaaagaaaagcaaaggcagactcttgggaaattctggcatttaggagacacaaagagtaactgaaaacagagaggcaaccactggaaaagccaggagagaaccaggatatacagtgctcagaagcatggaaggaacaaggaacaggcaggctggagaaggtctttgaattcaatggttgttggtaccttacaaaaataatagccaggggtggtggtaggcacctctagtctcagctacttgggaagctgaggcaaggggatcacttgagcttaggagttcaaggcagtatcactctacaattgcacctgtgtgaatagccactgcactcctgcctgggcaacatagcaaaatccctatctgtaaaaaaataataataatgtcatagagtatgaagccaaagggttatagagtatgagtcgacagtgaggaagtagagttagtgaatgtaaactatgcttttgagaaatttaacagagaatagaaggaaacaaatatggaaataaattagcaactgggaacaaaactatttatattaaaaattgagtcactgaattattaaataaggcatttagatagggagggaagaagacatgagttaagccatcttgggtagataaagagatgatgttacaactgtagaatacatccttccttcctcttccctccccctgtctttggctggtctcctggcctcagacaggcctcctgcctcagccacctgagtagctgggattataaatatgagccaccatgcccagctgttttatttttaataataatctttgcagaatacacattttatgcaaaacaatgaaagcagttagccactttacaagtgtgtgtgaccttgtgttgggttttgtggttcagtagctcatttattcctatatttgggggtctgggatcagaaatctcagttgtataggagagtagcttccattactacccagcttccatttccaggatccgctgttagttctttaagagtcagaagcatgtgtcgctgttcattttgacaagtgtcttcaccaaggttagggcaatatgacgggcagacagtattgacttaaaaaaaagaacatagtattttgaattaggctaatctttattcaaatgatgagtttgccacacttattagctgtctgacctaaggaaattgactttaccttatccgaacttcaatctgttcatctcctaacatagggatattaatatctgtcaaattacaatgtccattcataggttcaacaaatatttattgagcatctttatacccaagctgttatgtgtagtgataaatgaagtagtgatacatgaaagcctgtagcacagggcctgggaatgttagtttccttcccggtttccccagtgttagtcctaaagactcctggttactttaagtaatggtatgtgtttgaaaggaaaatagaaaaccattagttctttcttccccagacaccttcatcacttcagagagagtcactggcagttcttggtgtgtttatacttgattggaaaaccaacacaggagaatggttactgacatggtagctggacccctgacaacagctcatgtgggccaccggcaaccagccaaagtcctgtctcccctaacctgctctccaacccagaccccctgtgtgaaaaagtaggaagcactgttattacctggcaggagagttaaggaccttgaccattcagtggaggcctgccgcttctccagtgtgggcctgtatgaaggagaaagaagtactcactagacttgggttagccaggggcagctgtcaacaaatcaagctggcctgagccccagtggcttcttgcctatgacccattcctgttggcggatctagttacagaggagacattgtcctcaatactctctacagggccttggaaccgctatcctctgccaagaaccaggattcttctttaatacgtacttgctagtacctatgctgggaacagctgggctttgccggccagagtctgtatgcataactagaaatgagaagaatctggacatatttacaggcggaacaacagtcaaaagtaaaaccttggagagatttgattttatctgccatgctttgaccccataatttgaagagagggaagctgttgtcccacgcttggtccacctcactttgttaaagttcatccatcttttcccagtctcccttcaatttggaactaggaacaccacctcctgagtctcaaaagacttccagcaggagggacactcagtcactggcatgtaatggtagagtgtgatccaaagagcaggctctattgccagctcaaacctgagtttaaaacccagttccaccacattctacccctgggtccttgggcaagttacttaacctctctgaaccttaatttcttaacccataacatgaggctactatacacccaatagttgggcaaggggggtgatgagtatgggggaggattactttaagcaatccatgagatatgtatgtaaattatctgtcacataataggtgctcagcagttgttaatttccagtccccttcattggaccctagaattgtgttaataagtacatttgtatcatctaattaagacttttgcctcagaagccagaatgcctgctttggctctagctttttctagttatttgacctttgaacatgttatttatcctctctgtatctcagtcttcccattataaaatgggaatgatagtcctaccccatagggttgttgtgaggattaaatgcattattaatgcatagaaagcaattttaacacagcttggaacatacagtaaatggtagttgttgctttgtggtgttggtggacatgatgatgttatgagttaaaagctcaaaatgaaataataacaaatttttttagaaacataatgaccaagagagaagtttgttctttttgtagtgctctcagatgtcctgggcccgactgaggcaagagtgttgacctttctgaaatccatccttgaggtccccttgacttcaaaagcagcttttccaggcgttttccctctggcctaatgctgaagcgtcctcattacccagctgtcacactcagttggcctgattgaccagagccattcccgaacacatgcctgacctgctcacctctgagaaggctgactttgggggtgaggtggagatagggagacagcctctcccctcctctggcggtgctgtgctgcactggcactgaagtagttgttgctaaaagttctgacatgggagtgacaaaaatgatgaaaattatgaaggctgtcctatgtgaacttcagctttcacagaagattgtgcagattgacataattcccagaaattgccacttacaggccctctgtcaatgttggttgaatgaatgaagtgtttattgtttgaaatttggccctgtcacctttttttttttttttttttttttttgcctttcatcattttgtgagcaagatctctcctctgccttttaaacttcagtaaactgaagctcagatccaagtagttttttttctttccatcctttgccttctcttagctggcagagatggggttaagaattgttggcagctaatccaccttggtttgaggccctctcacactgagctggaggaatgactggaatttgagggggaggggaaaagatactctgacctttgcaggcccgtggcctccaagcagcatctcctgttcacgttctcccactgaactaatagtccaagtacccccagttcaccgcttttttccacacctgtcaacctttttaagaacctgggagcagactgtggctacttgagctttttttgttgatgttgaacattatgtattttgctgttatctctcaacctcttgaacatactatcttttctccctgcccccatccttctcattctgctcaaacccctcctccccacctcctctccaaatcccacaggtcagagtgcatcaacaagtttgcttcagtcttcgggaccatgcctctcaaggtggtggaacaccgagctgaccctgtcctgtacaaagatgactttcctgagaagctgaagagcttccccaacattggcagcttatgaaacgtgtcattggtggaggtctgaatgtgaggctgggacagagggagagaacaaggcctcccagcactctgatgtcagagtagtaggttaagggtggaaggttgacctacttggatcttggcatgcacccacctaacccactttctcaagaacaagaacctagaatgaatatccaagcacctcgagctatgcaacctctgttcttgtatttcttatgatctctgatgggttcttctcgaaaatgccaagtggaagactttgtggcatgctccagatttaaatccagctgaggctccctttgttttcagttccatgtaacaatctggaaggaaacttcacggacaggaagactgctggagaagagaagcgtgttagcccatttgaggtctggggaatcatgtaaagggtacccagacctcacttttagttatttacatcaatgagttctttcagggaaccaaacccagaattcggtgcaaaagccaaacatcttggtgggatttgataaatgccttgggacctggagtgctgggcttgtgcacaggaagagcaccagccgctgagtcaggatcctgtcagttccatgagctattcctctttggtttggctttttgatatgattaaaattattttttattcctttttctactgtgtcttaaacaccaattcctgatagtccaaggaaccacctttctcccttgatatatttaactccgtctttggcctgacaacagtcttctgcccatgtctgggaacacacgccaggaggaatgtctgataccctctgcatcaagcgtaagaaggtcccaaatcataaccattttaagaacagatgactcagaaacctccagaggaatctgtttgcttcctgattagatccagtcaatgttttaaaggtattgtcagagaaaaacagagggtctgtactagccatgcaaggagtcgctctagctggtacccgtaaaagttgtgggaattgtgacccccatcccaaggggatgccaaaatttctctcattcttttggtataaacttaacattagccagggaggttctggctaacgttaaatgctgctatacaactgctttgcaacagttgctggtatatttaaatcattaaatttcagcatttactaatactgcacatgtgtgaattatacctctttaagcccagttgatgaacaaatctaccctggcgaatgttaaatgttatggattcgaaacagatttatctggctctgatattaagattagccacagtttgggctttagccacaacatatgtccccaaaacacaaaatacataacaatttgcttagaatatggatataattacagaaacctagttgttttgccagtcagcgtcagtcatacaccatccattgttctgttgagtgacatgaaggtgggcagttattatgctgtagtttcatcaagagtcacttcagatgtgttccccagactttgagaggtcaaagaaagtttcagaagtagcaaagttggaagtggaaatcataagagttttgtcttctttcatttgaataagtgatcgaatcatggactattattgccaaagggggcaagcgatcatctcatccagtttgttcattttgcaaatgcagaaactgaagctgcagatgttcattttgcaaatgcagaaactgaagtgatttttttcagtttctgacagcagcaaacacaggtgcttaccaaatacttttgatttgggtaatgtgtactggtcagtaggagacatgggaaagcattttggtctcatgtattcataatattggggacgatatggtagaaagccaggaaaaatatttctgttgtcacccaggtaccagaggctgacaagcacagtgaggacctctaatctttctaggggttttctagtttgttttccaagatgtggggcaggtataggggagggtcttacattgaaatctctgctgaaagctatggactgtgctggcattgtgtatgtgtcatattgccctggtttcttcaaatttctgcccttttgctcatcatcgaatgcactaccttagtggctggtttctaatgcagcttctctcccaaagggtacatttttaaatttttattttttaaaatcttgagagtcctttgatttgggaagaggaactctttcatctgagttcattgtgagccctagagagctgtgtgactttatcatcgtcataggagtcattggactttaaaggcattacaactccatttaaagtacctcattactcccaggaatattgggtgttagatcttgcaacacagcataaaacaatttatgttaaagaaggagcattatatcctaggcacttgaaacaacctcaaaggtgatgttaccctatgaacagataggtggtacagtcaccgtagaaattcaagacagggatatagcaggtgatggcgattcatggattcagagtgggctagggactccactttattgttcgtgtatttctgagctgctaaccagcaaacctcacccataagcttaggtcaggatcatctgtcctcgggatgccatagagcctggtttcagaagcagaacaatcatgctaattaaaatgtcgtgttctggcctacagcagacaacagctggttttagattaagaaatctttt

SEQ ID NO: 193 - DNA, 46773 bp, Homo sapiens
  source 1..46773: mol_type = genomic DNA
tcatcccggtcactggcaaaattgcattaagttttatcctttactccagaaggtggcactcataggccctccatttcataaagagcctcatacttaatatgcctcactctgtccagagtctgtctgttgggatagcagactcaagtgagattttgtcacacttcaggggaaaccgtaggtcaaacatcatcactttttttttttttttttttttttgagactcagtctcactgtcacccaggcgagagtgcagtggcgccgtctcggctcactgtgatgtctgcctctcaggttcaagcaattctcgtgcctcagcctctcgtgtagctgcagttacaggcacacaccaccaccccacccagctaatttttggttttttgtttttttgttttttgagatggagttttgctcttgttgcccaggctggagtgcaatggcgtgatctcggctcacgcaacctctgcctcccgggttcaagcgattctcccgcctcagcctcctgagtagctgggattataggcatgcaccaccatgcccggctaatttttgtatttttagtagagacagggtttctccatgttggtcaggctggtcttgaactcccaacctcaggtgatccgcccccctcggcctcccaaagtgctgggattacaagcgtgagccaccacaactggcaatttttgtatttttcatagagacagggtttcaccatgttggccaggctggtcttgaactcctgacctcaagtgatctgcctgcctcagactcccaaagtgctgggattataggtatgagccaccgcgcccggccccagcattacttttaatgttctctctcctcaaacccagatacccacctctacaaaaaaaaagttaacttctgtttccactcctcctccttcattcttttccattctgggtcactgagcaggatataggttacccaacctcccctccccaggatcttaatcccggacctaccatttgcctagtactggttgtgtgaacttgggcaaattccttagcatttctctgcctctcttccccatctgagaaacagagatagtaatagtacccagtaaataagttaatggatgatagtagtaagaaaaaatgggctaggcacggtggctcacacctgtaatcccagcactttgggaggccaaggtgggtggatcacgagatcaggagtttaaaaccagcctggccaagctggtgaaaccctgtctccactaaaactattaaaaaaaaaattatccgggtgcagtggcaggcgcctgtaatcccagctgctcgggaggctgaggcaggagaatcgcttgaactcagagggagaagttgcagtgagctgagatcgctccactgcactccagcctgggtgatagagtaagactcagtctcaaaaaaaaaaaaaaagaaagaaaagaaaagaaaaaatgttccgtttcatatcagattttcatagctagtaccagagaaggggtaataagctggaaaagctaaagaattggatattttttaatgcaaattgttgtttttcttcatttgtctactttattaagctgtcctcaggccccaagaaacatactgtcccctcatttagaaacagactaactccgttttcctccactatcccctcccctgtccttgatctgtagatcctgttaagacaggaaaaacagtgttggtcaaagggtacacgctttcagttacaagatgaacaagttctgaatacgtaagatagaacatgggaggtgatgtggccgggtgcagtgactcacgcctgtaatcccagcactttgggaggccgaggtgggcggatcatgaggtcaagggatcgagatcatcctggccaacatggtgaaaccccgtctctactaaaaatacaaaaattagctgggcatggtggcacacgcctatagtcccagctacttaggaggctgaggcaagagaattgcttgaacccaggaggtggaggttgcagtgagccaaggttgtaccattgcactccagcctggcaacggagcaagactccctcacacacacacacacacacacacacaaaaatggtgatgtgttaattgaccatggcaatcattacacaaatgtatgtgcatatcaaaccatgttgtatactttgaagaaaataaaaaaacgacaggaacaacaaacacatccttaacactcaatcattttatcccagattatgctgagttcatgtctcaggggaaacaccaaaatccatggaactgctctcattttttatcccctaaatgtcactttaacataggaaatgtccattgtggggttatttgcatttaaacacaggccaatgaaaaaagctaaattaaaacgtaattatcaaggtaatggaaagatatcctaatctcttaattaacaagactatcaggaatattttgaatgtccaatcactctaggagtcccaattctcttaaggtaagaacttcaggatttaaacaaactcaatgtgaaaataaacatttattataaaaattagttttgacattttaaagtgaatgcagacaaggtgttttccagttcaaaaggtccattgtaagctagagaagtaaattccaaggctggcaataactgactcatattcttcacaagtggcctagacaataaggaaccattcacctcaaattcacagagccatgaatcacctctgcttccccatgaccttttccatatccttcctactctgtcttccaaccatgacacagaactgaaacatactttaaaaatctcatccttggctaggcacggtggctcacatctgtaatcccatcactttgggaggccaaggcaggcggatcaagaggtcaggagtttgagaccagcccgaccaacatggtgaaaccctgtctctactaaaaacacaaaaattagccaggcatggtggcacgcacccgtaatcccagctactcaggagactgaggcaggagaatggcttgaacccgggaggcggaggttacagtgagccaagatcataccactgcactccagcctgggtgacagagcgagactccgtctttaaaaaaacaaaacaaaacaaaacaaaaaacaacaaactcatctttactgaaccatttcataagctctactttatttgtctagttggatttcatttcttctggaaaatttattgtttattggcatgtgacccttgactgatggcttcattagcattttgtttttctttttggatccttaatagaaaactcaattctgttagggatttccaaataggatagggcaaagtcgcacttagtatatcctccacagaaagaaagaagcaaaatcaagccaagagggccctttacttgtcctcttgctaagttaataaatagactggtggatggtggtagatggagaaacaaaaatgtaagggcagagaagggtccaaatggggaggaagaaagcaatgacagccaggctgtccggctcattcctgttcattcacatgcagaccacccatgatctggtcttcaaatttcttctgaattccaccccactaaatacagtagcagttactactttaaactactactaaagcacttgttctccaaatgacctgagaaatccccttgcctcagctctgggacagtagttcctacagctgtagggaggtctgttaatgcacctggctgaacaggaggtacaagagtaagtaccttctctcacttggtggaacaggccaaggagatcccccaagtacagcatcagcttcaccctgtgtaccttcctccagcaaaggaaggcctggccacaagagggctctggaatgaaggcctgaaattcagaagctctgccttgagataagaaccaggaaggggcaggaccaggcactgggaaccagccccaggttgctgggaagcaaggctttgaggcattttcctgttgtacaaaggagcctaggaaccctcaaagaccttttcccctacttacttcccacaaaaaagagccttgacaaaccaaggttttatttccagcaacattcagctgatacaaacacatagaaatacaatctcaccaaagagctaagaagccctccaacacacgcccaatttcagcatacagctaagactacacaacacacacacaagctcaacaaagagctaagaccactacacacatctccacagcaccacaggcacatctcaaaagggtctgtccagtagttccagccaagggaagggtgatggcctaagccaccagctccagctttcttttctttctttttttttttgagctggagttttgctcttgttgccaggctcctgagcagctgggattacaggcatgcaccactatgcctggctaactttgtatttttagtagggtttctccatgttggtcaggctgatcttgaactcctgacctcaggtgatccgcctgcctcagcctctgggattataggcgtgagccactgcgcccagcctccagttttcttttctttagagcagcggttttaaatccttttggcttcaagttctctgaaaatttactatgctctccacaacaagagctcccattttccacagacacagtcaatgtcagtcagcttgtattcaggaggacagggcagagggatcccagtggcacttcccatgggaagacagaagagagtgggccccagagatggaaggaccccagtgtcatcaccaaacaaccatttcagccgctctagcctctaattcccgctctagaacagctggccctggtcgtcagtacacaaggaaagagcccagaaccaagctcaagatacctattcaaagatccctgccagccaggtgggcagttgagtgcagattcctgcgacccccgccatttttgctgtctacttagaagggaagtcaatggcatacccaggattccttcctgatccctcaaagaaatggggaataaacactttaaacaagttccaggccactcagcagtggtaggaaagggagggagggcatgaaggaggatggggcacatagctgacattattaaaaacacatccgaagaagtagggggccctgtggggtgtagaagacaaataaggcatcctgtgaaactacagacatcaggggccagagtccggtagcacctgagtaaggcaaatgcagatgataggcggtgagccgaccaggctcacaccaggaatgacgaggtctgtttgaattctccctgcagaaataaaacatccagtcaactctcaatagtcttctttagctgataatccccaaaacacataaacatgggctagaaatctcctcactccagccccaggtggcccacccctgcccaggggaggcatactcacttcacttcgggcactaggctggctgtaaatcaccttcttactcgaagtcctgtgaacaagccagaagacagagacactcagccacctaggtgcttattaacctccccttgccaactttaaaggccagaagcgagaatgctacagaagcacagagtgcgcagcagacaggtatgggtggggtaacaggacagacccagggccaaggccacagagaaagggctggatatccaaatgccttccctccaaactggttgcttctgccttcaacccattcccctaggcccacttcagcttcaaaccacatgcatccatgctctcaaacttggagaaccccaggacagcacctcactcaccctttctttgttcctgaaagagaagaaatgggatcatgagtgtcagcaggacagaagacagcatggcttgggaagatggaggggcaggcccccagctcttggtgttagatgggtgatcagtgttccccaggggacaacacccacacacatgagcacagtatcagggtcagtactcagatgacacccatgccaggccctgggatgggggcagtacaaaggagagcctctgggggcagatacttactgtcaaagtggcctcggctataggcaaaccagatgccaaaaaccaagattcccaggagaatcagggttacaaggacggctgccacgatgacccccacattccgctccactgcgagacacaaataagaagtcaggcacggggatactcactcacggcacctacagtatcaccaatggcaggatgaaaagcagaccccaatccccaccccaggtctgggctcaagccctaactctcaccagcttccatgcgcacagcatttgaagtcatgggtgtcccatacccattccgtgcctcacagctgtattctccagtatcagaggctgacaggggatcaaagacctgaggaaggaaaacaaattggcttcctgctgaagaagcaaaatagacattttttaatgtctcttgaccccagttccaagttcaccctgttgcctgttcttcctcccaccttttggggttctataactgcatcccccacacatctttcaccaccaccccatacataccagctctcctgttgtgggattcaggacataggaagagttgctgaaggcacgggtgcttttgggattcgtaggcatcactatcccatctttgaaccaggtgtattcagaaggtggggaaccatcttgttctgagcatgtcagcactgcccggttcccaatggtggcagaggaggggatgttaactgtaggcttggatggaggcactgtggaagagaaagacagaaggtgctgagtacagggtgggggctgcttgagtctaagtaaccaactacaatggtacccccaactactcagctcaagcctcctactctcaccatgcccctggctgccacctaaccaggggctcatctccctctctggcagctccaggactctgaatagcccacctgtgggtattctcaccatcaaagagctccaaagtgcagcagagcctgctatgagaagtaactaactccaggcccacccagaagacatggggcacgtaccaagcacgatgagcttgaccttgacctccccatagctgttgccgccttcctcagagaccatacaagtgtatgtcccagtgtcttcccgtgtcacggacttgaaggtgataccagttggcaagaaggtcacccggtcctcataggaagctaccacaagaggaggcaagagcaaggacagagtgaactggagagctaagggaggctgatgaagggggcatccaaggtacgcaagtgctctcctcttcccccagaaaggggggtaggaaggccatgaggacttcagccccagggtgtgccctgggataagggcacaaagtctggatcgtagaatccaggcatgataatccctccacaacctaggcaatcaggaaggaggagaagcaactcacctgtgatcttgttattatagcaaacgagtctggtggtgtctccttggtcaaacttccactccacacggggagaagaaaagcccgagtaggcacaggacaacttcacagctgcagacagggtcaaaatgagccgaaggaagaagcagcagcaaatacacgagatggggaacagccccaaactgcaggctgggctgggtgctctctagatccccaggcggccggcaactgctcaccctcacaccctccatggcccctcccaactcacgattattctcaggaattctgacttcaggttcagaagagtgcactgtaacactgcccaatgccagggagcctaaggagaaagaaagaggtgggccctgtcaggagtggacagagaaatgccaggaagaaggagtcacagacccagtggacagggcttctccattcacagaccctaagaggaagggattccagacttatgctccctctggctctcacactttgtcaccatgatcctaaatgtcttctttaagtgctttttgctacaattgccagctaatacttcttttatccatgggaatgcagtttcttttgcttctaatttttctctctgtgactcccaataatctaattagatttctactagtccaagggcagcttccagaatgacatttcactgttcagagaaagcttctcaacaaatgattgcagccacttgtcaggacaatcctggaaggaagccagcagggctggaggcaagggatggaagggaagggcagagccatgatgaggataataataatactcgacatttgtggagcatgtggtgcttttaaaagtgttttcgtgtacattatgacacgttgcatcatttgatcctggacacaagcatgacagatcggcaagacgtatattattatcccgagtttacatgaggaactgagagtacaagaagtaaatgtgcctaagatcacacagctggggccaggtgcggtggctcaggcctgtaaacccagcactttgggaggccgaggtggggaggtcatgaggtcaggagttcaagaccagcctggccaatatggtgaaaccccatctctactaataatacaaaaattagccaggcatggtggcacacctgtagtcccagctacttgggaggctgaggcagaagagtcgcttgaacccgggaggcggagattgcagtgagccgagatcgcgccactgccctccagcctgggcgacagagcaagactcaatctcaaaaaaaaaaaaaaaaaaaaaacacacaactggttctgaggtgaagtttgcactagaagtgggttcagatcacctcattagaatattctacttgccaaatggagaaagaaaagaaaagatagtgtgtgctgggtggagggagggagaagcaacaaggctaattaaataatatgggggaggtgcatcagggttcataggagggacccacaaaggtcaaattaagaaccagtgaccagggattctgggatcacatgatgcagctacaaacctgcacttacacaattattctcatccatgttttcaaagtcaaattcatgaaatatccttttatttgtagcttcaagtcaggaccctgtcttagataaatgtttgtagaagtcaagcacatctgttaaattcaagtacatttttcttttacttaattatgcacataactgaatatggtctcttgacctctgagactccccttcctctctgaaatatgaaatagatgtgctctaaagtcctttaggttcttttttttaaattttggcattaatgtttagataatatttgtatacctgtatttcaatctgatataataacactatgaattagtccagataagtattctctctcccattttatagataagagactaaagatataggttactcctatatcctttttctcttattatactctctatttatttgttttttttttttttgagacggagtttcactcctgttgcccaggctggagtgcaatggcgctatctcagctcactgcagcctctgcctcccaggttcaagtgattctcttcagccttccaaacagctgggattacaggcgcttaccaccatgccggctaatttttgtatttttttttttttttttgagacagagtttcgctcttgttgcccaggctggagtgcaatggcgcaatctcggctcaccgcaacctccaccttccgggttcaagggattctcctgcctcagcctcccaagtagctgggattacaggcatgtgccaccatgcccggctaattttgtatttttagtagagacagggtttctccatgttaatcaggctggtctcgaactcccgacttcaggtgatccgcccgcctcagcctcccaaagtgctgggattacaggcgtgattaagccactgcacctggcctaatttttgcatttttagtagagatggggtttcaccacgttggccaggctggtctcaaactcctgacctaaagtgatctgcccgctgcagccgcccaaagtgctggaattataggcgtgagccacggcgaccggcctaattttcttttttttcttttgtttttttgttgagacagagtctcactctgtcgccctggctagagtgcagtggtgtgatctcggctcactgcaacctctgcctcccacattcaagagattctcctgccccagcctcctgagtagctgggattacaggcgcccgccactacgcctagctagttctaactagttttttgtattattattattatttttttaagatggagttttgttctagttgcccagactggagtgcagtggcgcaatctagactcaccacaacctccgcctcccaggttcaggagattctcctgcctcggcctccctagtagctaggattacaggcaggcgccaccatgcccggctaattttgtatttttagtagagatggggtttctccatgttggtcaggctggtctcgaactcctgatctcaggtgatccacccgccctggcctcccaaaatgctgggattacaagcgtgagccaccgcgcccggcaattttttgtatttttagtagacagggtttcaccatgttgtccaggctggaatttcttttttttaaagagctgggttcttgctacattgcccaggctggtctagaactcctggtctcaagcagttctcctgccttggcctcccaaagtgctgggattacagatgtgaaccatcacgcctggccatatagcatggttttcaaaaaagaagggtataggctgggcacggtaggtcacacctataaccccagcactttgggaggccaaagagggcagatcacttgaggtcaagagtttgagaccagcctggccaacgtggcgaaaccttatcgctactaaaaatacaaaaattagccaggcgtggtggcgcgtgctacctggaaggctgagcaaagagaatcacttgaacccgggaggcagaggttgcagtgagctgagattgtgacactacattccagcttgggcaacaaagtgagactccgtctcaaaaaaaaaaaaaattaaccaggcatggtgacacatgcctgtagcccagtaacttgggagactgaggcaaaaggactacttaagccaaagagtgggaggttacagtgagctacaatcacaccaatgcattccagcctgggtgcctgggtgacagagcaagaccctgtctctaaaaaacataagaaaagaaaaccgagctgtttcttagaaaaaccataggtttaatgaaaaaaaaactaataaaaatatttctaatgatattattttatttatatatttgccattacatttttaatgtcaaatttatgctcaaatgtaataatagatatggaggctgagcacggtagctcacacctgtaattccagcactttgggaggccgaggtggggagactgcttgagggcaggagttcgagaccagcttggccaacgtggcgaaatctcgtctctagtaaaagtacaaaaaccagccaggggtggtggcactagcctgtaatcccagctactcgggaggctgaggcaggagaatcactgaacccaggaggtggaggctgaagtgagcctagatagtgccactgcactccagcctgggtgacagagcaagactctgtctcaaaaataaaataataataataataataataataataataatagatatggaaattaaaccaaatagcttttattaaattgaaaattcttcctgaggacacataagtctcctcccttcctccctccttcctccttcccctccctcccctacctcccctatctcctccctcctttctcactctgttgccccggctagagttcagtggcaccattatggcttactgcttagggcccagtgttggcctgctgggctcaagtgacccacctcagcctcctaagtagttgggactacaggcctctgtctcccgggttccagcaattctcctgcctcagcctcctgagtagctgggattacaagcacgagccaccatgcctggctaattttttgtatttttagcagaaacaaggtttcatcatgttggccaggctggtctcaaactcctgacctcaagtgatccacccgcttcggcctcccaaagtgctgggattataggcctgagctaccgcacctggcctgcccagctaacttttacaatttttttgtagagaccaggtcccactatgttacccaggctggtctcaaattcctgagctcaagcaattctcctgccttggcctcccaaagtgctaggattacaggcgtgagccaccatggctgtggaagtctcttactcaactctcattaagaatgctaataggctgggcatggcagctcaacagcctgtaatcccagcactttgggaggctgaggcgggcaggtcacctgaggtcaggagtttgaaaccagcctggccaatatggcgaaaccccatctctactaaaatacaaaaattagccgggcatggtggcgggcaacggtaatcccaactacttgggaggctgaggcaggacaatcacttgaacccgggaggcgaaggttgccgtgagccaagatcgcaccactgcactccagcctgggtaacacagtgagactccatctcaaaaaaaaaagggggggggcacttctgttccaaagtgttccaaagctgtctgtgggataggctgaggcctcaccaagactataacgcaaacttggcctctccctctgtccaactttgcttccttcccctcctttccacgggcgtggatcccaagtgcactccctaataaatgtcttgtatgattattgacatctcagagtcagcttcccaagaacccaacctatggcaccacccaaatgaacagcagcatctaattagactaaaaactagcctttgaaataaacacacatatacacacaaatcacaacatgtgaatttgatggttgttcctccaccacttctggtttagctaaagttctttgttgagtcctctcagatcatcacattcacaccacacatatacaaacacgttgggctacaggcatattacccttttcttcattaatccgcactgccatcacctggtctgggcttctgttattttgtttcaaatacacgaacctccgccttagtgtcctcccacccacctctgttgcaggattaactacgtctgcctgtgacctgactgtgccaatactcccaaggtgtattgtgattgcctatcacatcatgagtcaaggccagccttatcaccatgtccttcccattcaccacaggacacctcagccatcctggtccacattccccttctcattcttgaacaggcccctggaaccagactgcctgcgttcaaatcccagctctaggctgggtgcggtggctcatgcctgtaatcccagcactttaggaggcgaagcaggtggatcacctgagatcaggagttcgagaccagtctggccaacgtggcaaaaatccgtctctactaaaaaatatatatataaaaattagccgggtgtggtggcacatgcctgcaatcccagctacttgggaggctgaggcaggagaatcgcttgaacctgggaagcagaggttgcagtgagctgagatcgtgccattgcactccagcctgggcaacaagaaactccgtctcaaaaaaaaaaaaaaaatgctgggcgcagtggctcatgcctgtaatcccagcactttgggaggccaaggcgggcagatcacctgaggtggggagttcgagaccagcttgaccaacatggagaaacctcgtctctactaaaaatacaaaattaaccaggcgtggtggtgcatgcctgtaatcccagctactcaggaggctgaggcaggagaattgcttgaacctgggaggcagaggttgcagtgagccaagatcgtgccattgcactccagcctggccaacaagggagaaactctgtctcagaaaagaaaaaaaaaaaaaaatcccagctctgttacttactaggctatgtgacctggacaagccacttggcctcctcaaatctgagtttacgcatctgtaaaatggggataataacagtttctacatcaaagggctgttctgaaggctaaacaagctaatactgtacaaataaagtgcttagagcagtgtctgaacaggaaaccccaaataagtattatattttatgattatcatcatctgttcataggcccttctgtacacatacttctttctgacttcaatgttttcttcaacaagacatataaataaagcctgaaaagtgcctactccagcctaccaaaccatatctcccctgtcattgcagctgccttgggaaggcggccccttctctagaaccttcacagctgtaccagcagagctaggaacttgctctcactgaatccaatctacatcaggacactcacagtttccctgtccatcctcctcatctatttcatattttcccgtgcctcttcacagccccccttttgcacttaaccttgggcccatacataccatactgtacacacacatgcaaatgtcctactgatgtacgtggtaaacgaataatagaaggaaattccatcctttccattgtcaagtttaattttctctaagttcacaacaagaaaagccacaaagttaaaggcatcaatagattttggcctgcttaggttttgggcccatgtatagaaagtccattctccagccaggcacggtgactcacgcctgtaatcccagcactttgggaggctgaggcaggcggatctcgagatcaggagatcaagaccatcttggctaacacggtgaaaccccatctctactaaaaatacaaaaaattagccgggcgtggtcgcaggcacctgtagtccctagtcccagctactccggaggctgaagcagtagaatggcgtgaacccgggaggtggagcttgcagtaagctgagatggcaccactgcacttcagcctgggtgacagagcgagaccccgtctcaaaaaaaaaaaagaaagtccattctccattccactactggatgaagtgctagcatttattgagcacatactatatttgaggcactgttgtaagcatattatatgtaatatcatttaatccctgcaacagcctttagagttgggtgattctatcgttatcacccatatttacatggggaaactgaggcccagagtagttaagtaacttggctaaggccacacagtgagtggtagtgcagattcacaccaatgcagtccaactgcagaggctatacaatgctacactatactatacagccttcctaaaaatgcaaatctgatacctcctttaagcttttgatgattctacattgcttatatgataaaatccaaatttttctgcaagctaagaaagttccaataatccctatactctgccaaacgcccacctccctctctcccaccaggaagtgctggaagaaagttccagcactatctgaccccttgataaggttatcatcttcatcacccactctactgttgcaatttaccctctagcaatacaaaactacttaaaattcctagcaaagtctgggctgtttcacaatctctgcctttgctcatgctatttctgctatgtagaacacccttttccccctctttatctgggcagcagtattcatccacattattttctggaaaacgacctcccacatgcccagtcctcaccatagcctcacctaagcctctttcctaggctttaattatcccatgcaaaacactgtcaaagcaattcccacattataatgacatcatctgtgtacaagcatgtctcccatggtaaaccccaagtgaaaagggaccatgtgttatttaatattctgagtatcccacacttagcataataaaactggtacaagttgacattcaataaatgttttctcagcctgggcaacacagtgagacccccatctgtaccaaaaaaaaaaaaaaattaatcagctgcagtcatgcacgcccatgaacgcctataacactgaggatgtaattcctggaaattactacgtacctgaataataataatgaaacaactgtggcaaatagtattttccaaaacagccacatctatctatatatttatctcctcccccatgctctacttacattgtgactgaggtggagtctaagttaagtttcctccccatgggccgggtgcggtggctcacgcctataatcccagcactttgggaggccgatgtgggtggattgcttgaggtcagaagtttaagaccagccgggccaacatgataaaaattacaaaaattagccaggcatggtgcatacctgtagtcccagctacttgggaggctggagaaccacttgagcccaggaggtggaggctgcagtgagctgatatggtgccactgtacttagtctggatgacagagcaagactctgtctcaaaaaaaaagtttcctccccatgaatctgggagggtcttatgattgacaatggcataatggtagaagtggcatattattaatgttaggccttatatgcattttctcactaaactcttaaaaaaaaaaaaaacctatgagacaagtaccattgaagattgaagtactaccgttaccatttcattttacagatgaaaaaactgaggcttagaacagttgacccaggccaggcatagtggctcacacgtgtaatcccagaactttgagagtccgaagcaagcggatcacaaggtcaggagttcgagactagcctggccaacgtggtgaaaccccgtctctactaaaaatacaaaaattagctgggcatggtggcaggcgcctgtaatcccagcgactcaggaggctaaggcaggagaattgcttgaagccgagagggggaggttgcattgagctgagattaagccactgcactccagcctgggtgacagagcgagactccatcaaaaaaaaaaaaaaaacagttgatccaaaccatatggctacaaatagcaaggtaggaatcttaactctgcctgattttgaggctctaaaactattatgctatatgtagctttattggacaagcaaggaaatcccatgtatctttcaagatcctgttcaaatgtctattgatctcttatacctttcctcagtcaaaattaatctcaccccaatttctaggaatatagcctaagaaagcaatcaaagataagtttaaatattttggctgggtgcagtggctcacgcctgtaatcccagcacttcgggaggctgaggcggacggatcacttgaggccaggagtttgagaccaacctgaccaaaatggtgaaaccccatctgtaccaaaaatataaaaattagctgggcgtggtggcaggcacctgaatcccagctacttggtaggctgaggcttgaacctgggaggtggaggttgcagtgagctgagattacgccactgcactccagtctgggcgatagagtgggactccatcttaaaaaaaaaaaaaaaaaaaaaaattcatgtacaagaacaatttaacgttatttaggtttcattgttcgttttttttggaaactgagtcttgctctgtcgcccaggctggagtgcagtggcgcgattgtggctcatggcaacttccacctcccaggttcaagagattctcctgcctcagcctctccagtagctgggattacaggcacacaccaccatacccagctaatttttgtacttttgatagacacggggtttcaccacattggccaggctggtctcaaactcctggcctcaagtgatccgtccgccccagcctcccaaagtgctgggattacaggcatgaaccaccatgcccagccaatttaatgttatttagtataacaaagaaaaaaaagaaatctaaatgcccaacaaaaggtgaataagtaaattatgatatagccatactttaggaataatgtagaaaggaccttaaagtatattttgggccaggcgcggtggctcacacctgtaatctcaacactgagaggccgagacaggtggtcaggagttcaggaccagcctggccaagatggtgaaaccccatctctactaaaaatacaaaaaaattagccaggcgtagtggtgggcacctgtaatcccagctacttgggaggctgaggcagagaattgctggagcccaggaagtggaggttgcagtgagctgagattgtgccactgcactccaacctgggtgacagagcgagattccacctcaaaaaaaaaaaaaaagtatattttgtaggaaatatagacgtatctcacacattaattcataaagactagaatgaaacaccagtaataagtgtttatctctagataatagaattacatgtgattttattttctccatagtcctttgcattttcctatttttctacatggagcatgtatcactttttttaataaaacaaaaagcttatatctttaaaaagttactctcttctcgtctatgctcctaaaacattttgtactttgttgacagcccctggcacacgctgctctgtactctacctagtcaatacgtgtctgcagtttcttgagttctgcttgtatccttccccagctcccagcactacactttgcacagaggaggtgctcgatgaactgcaccaaagcactgctggggtgagaagatggtcacagaaggcagaggcctccagactcttaacagaacccaccaacaaccatcccttgtacgtgaagggtcaggtcagacccataacagaaaaggacctacttccttctactactttgctaagaaacctttagttttttctagatatcctgttaattattagaattttctggccaggtgcagtgcagcagcttaggcttataatcgcagcattttggaaggccaagatgggagaatcacttgagcccaggagttcaagaccagcctgggcaacatagaaagatcccatctctatgcctcagggatatcaataacaaaacataaaagaagaaatacaacataaaaaagaatataacaaattttaaaaagagagaggctctgatctctataaaaataaaagaaaaaaagaattttccttgagttgcttttgtgtcgtttgaattaattaattttatttatttatttatttatttatttatttatttattttgagacagagtttttgctctcgtcacccagggtggaaagcaatggcatgatctcagctcactggaatctctgccttctgggttcaagcaattctcctgcctcagcctcccaagtagctagaattataggcacccaccaccatgcccggctaatttttgtatttttggtagaaacagggtttcaccatgttggccaggctggtcttgaactcctgacctcaggtgatccacccgcctcagcctcccaaagtgctgggattataggcgtaagccactgcacccggccgatttatttatttttaactttaattttaggctcaggggtacatatgcaggtttgttatatagatgaattacatgtcgtcggggtttggtgtaaagattatttcattaccctgctaataagcaaagtacccaaaaggtagtttttctatcctcaccctcctcccatcctctaaactcaagtaggccctggtgtctgttgttcatttagggaaaaaaaaaaaaaagaagaaagaggaggagggggaaaaggagggaaaacagtcaaccagtctctctctggttttctctaagaattcatccaaacttccctctgggcatatgagactcacaagaccccccagttgccagggagctggagccctgcaataggaaggatgagtcagggcctcctcaccccaccagctacagcatacccagtttaacttcatgttttccccctaatctctagcacagtgctcagaacatagtaaacaccaatgtttgttggattaacaagtgaatttcacactgcaatacaattagaacctggacctagagcttccactctggttttccccttcctccccaccactcaccctgtagagattgaagtaactcccataagggttggcctcctcgtaaagatcaagaggctccatgggccagggaagttccacagggaagggcctttccggggtttggggtagaacagtttagaaatgtgtgagcaagaggaaggctctgtgaggccaacaacaggctgggctatgtctaaatagccatccttggctgcactttcagtgatgtcgatcagctggctcgggtcctctgaggatggcagaaagtggtaatggcagggtaagacaggctcgctttcactccctggctccctcccgccctctctgcagaatttccggttctacctgctcagctcccccgccaccccatcttcccagtgcaagggaaggtcgagccttccagcgcaggacttacttcaggggcccagcacccacttcctgccagccagctgcttcctcctgttccgcccctacattgtgaaacaaatgacgcagccggactttagacagaaaccctgcttatcagggagtccaggcagatgaactctgggttctcaatgccaggaaaaccctagtgtgtatccactctcacagtatgtgttcactcatactgctttccacaaccgtcacacaatagtgaaacctcatcctcaattatgttggacgcaaggtcatccaggtctttcctgaatctctgaaacagaaactggtttgagtttagagatctccagggtctctagtcaaacctaacagatgtgataaacaagtctcattattatcacataaaatgtgcatggcatttaaatctatttttgggtgtggtggaaacgtgtgttgcccatttatgtgtccacagaacaagtgcaaattgaactcagctgacttggaggggggtgggatgtatcctaacagccaaggccacaatccctagaaaccaatatgggccaggtgtagtgactcatacctgtcattcagcattttgaaaggccaaggcaaaaggatcccttaaagccaagaattcaagaccagcctgtacaacagatgagaccctgtctgtactaaaaaaataaaaaattagccaggtatggctcaccactcacacttgcctatagcctcagctattcaggaggctaagactggaggattgcttgaacccaggaggtcaaggctgcagtgaggccaggcacggtggctcatgcctgtaatcccagcactttgggaggccaaggcaggcggatcacttgaagtcaggaattcaagaccagcttggccaacatggtgaaaccctatctctactaaaaatacaaaaattagccgggcagctcacacctgtaatcccagcactttgggaggccaatgggggcagatcacaaggccaggagatcaagaccatcctggctaacatggtgaaatcccatctctactaaaaatacaaaaaaaaaaaaaaattagcagggaatggtggcgggtgcctgtagtcccagctacttgggaggctgaggcaggagaatggcgtgaacccgggaggcagagcttgcagtgagccgagatcacgccactgcactccagcctgggtaacagagcaagactccatctcaaaaaaaaaaaattaaattaaaaaaatatgtacaaaaggctgggcacagtggctcatgcctgtaatcccagcattttgggaggccgaggcaggcagatcacgaggtcagcagatcgagaccatcctggctaacacggtgaaaccccgtctctactaaaaaaaatacaaaaaatcagccggagtggtggcgggcccctgtagtcccagctactcgggaggctgaggcaggagaatggcgtgaacccgcgaggcggagcttgcagtgagccgagattgctccagtgcactccagcctgggtgacagagccagactccatctcaaaaaaaaaaatatatatatatatatatatacacacacacaaaaattagccaagaatggtggtgcacgcttgtgtcccagctactcgggaggctgaggcaggagaatcacttgaacctgggaggcagagtctgcagtgagacaagatcacgccactggactcctccctgggcaacacagcaagactttgtctcaaaaaaaaaaaaaaaggctgcagtgagctatgatcatgccattgtactccagcctgggcaacagagtgagaccctgtttcaaaaacaacaacaacaacaacaaaactccatgatatatatatataagcaagatgtagaatatatgtagtatgcctctttttgtgtcagaaaggggagaaaaaacaagtattatttatatatacttgtatctgtaaaatgaaacactgaagagacattagaaactattggggtttggggtgaacaggagcaacatgggaatgagataccccacccctttgatatcattttaattataaaaccatgtcaattaacctattctaattaaatttttttaaaaaaaatcacagtagctctatcttgaatcggaactgggctggagactccacaagacatgatcacaaaggaactgaagagcaacatggtgaggtaaaagtggtctggagtggccaggtgcaggggttcacgcctgtaatcccagcactttggaaagcctaggcaagaggattacttgaagtcaggagttcgagaccagcctggccaacatggtgaaaacccgtctctactaaaaatacaaaaaattaggggccgggcgcggtggctcacgcctgtaatcccagcacttttggaggccgtggcgggcagatcatgaggtcaggagatcaagaccatcctggctaacacagtgaaacctcgtctcaactaaaaatagaaaaaattagccaggcatggtggcgggcgcctgtagtcccagctactcaggaggctgaggcaggagaatggcatgaacccgggaggtggagtttgcagtgagccgagatcgtgccactgtactccagcctggcgacagagagagactctgtctcaaaaacaaataaataaataaataatacaaaaaattagccgggcgtggtggcgcgtgcctgtagtcccagctgctggggaggctaaggcaggagaatcgcttgaagccgggaggtggaggttgcagtgagccaagatcatgctactgcattccagcctgggtaacagaatgagactccgtctcaaaaaaaaaaaaagtgatctggagccagaaggcaaagactaaaggacactgaaattccactgccactcgtttcctagttccaggtagaactaggaagtgccagtcaccagtttctagtttggagggaacaattcactcctgggagtagagggagaggaaaggaggagtgactcaccagtgtggggaaaagcaagagagatcagattgttactgtgtctgtgtagaaagaagtagacataggagactccattttgttctgtactaagaaaaattcttctgccttgggatgctgttaatctatggccttacccccaaccccttgctctctgaaacatgtgctgtgtcaaactcagggttaaatggattaagggttgtgcaagatgtgctttgttaaacaaatgcttgaaggcagcatgctccttaagagtcatcaccactccctaatctcaagtacccagggacaaaaacactgcggaaggccgcagggacctctgcctaggaaagccaggtattgtccaaggtttctccccatgtgatagtctgaaatatggcctcgtgggaagggaaagacctgactgtcccccagcccaacacctgtaaagggtctgtgctgaggaggattagtataagaggaaggcatgcctcttgcagttgagacaagagaaaggcatctgtctcctgcccgtccctgggcaatggaatgtctcggtataaaaccaagacattgtacgttccatctactgagatagggaaaaaccgccttaaggctggaggtgggacatgcgggcagcaatattgctttgtaaagcattgagatgtttatgtgtatgcatatctaaaagcacagcacttgattctttaccttgtctatgatgcaaagacctttgttcacgtgtttgtctactgaccctctccccacaattgtcttgtgaccctgacacatccccctctcagagaaacacccacgaatgatcaataaatactaagggaactcagaggctggcgggatcctccatgtgctgaacgctggttccccgggtctccttatttctttctctatagtttgtctctgtgtctttttcttttccaagtctcgttccaccttacgagaaacacccacaggtgtggaggggcaacccacaccttcacaccagtctacggttttgaggtatgcctgcccctgaaagggcaaagctagaagggcttgagtcagaaacatcaatagtaaacactgggactcagagaatgacccagaagcagggcagcagttctgccctgcccacgcggaactcttcagtgatgataccacactcaaggaagggcaggggagcaaatgccagcattccaacccaggtttccctctctcccctgtggttacactgtaagttgacctatccacactcacctctactgtgtctctccctacctggtagacagctgaaccttttctaagggacaggttccctagggaaagggaggctagtactctgggtcatcagttttacttttcccaagtccagctctcccagtgtctaccctctggatctctgccccacagggtcagggtttcccctccattaggttccccaagctggggccaggcctttgcctgacttgtcagtcctatcttgccttttctacttcctccctgacagcagagcccacaatgaagaacagggagaacatatgggcaacctatccacgcctctcagggacagtggacaagctagacacccaagaaaaagctcctgctttttgatttctgactctagccatttgggatctccctgcttccttttttacctactcagctagggacagcattctggcattcttccatcctcacaaaatccacaggggataacagctgcccaaaaataatcccttcatgtatatgtaatgtaactattatgctggttgatcctcctgacaaaggtgggacaagtattactgctattttacagatgaaaagactgagctactgcctaagatcacaaacaaggcagagagaaagccaagctagaatgcaggtatggtggcccagctcccatttccatcctcatttgcactaaccaaatcactcccctcccccaacccaaccccagatctagcctgatttaaaagttacaaggtcagttcctccatcccctggacaagtcacttcccaggacccactgtcctaacaggctaatgcgacatcatctcaggttccctctgcactactgtggcttggttccctgaagacacctccaagctcaaaatggtgttatcatgaccttccagtgccagtatatgattattttaggattatcataaataatataggaaattagagggagaaaaaagaaaggaagcagtggcaaaggatagggagtaagcagctccaggaagcttttaagcctgacaaatactgtcacagacaaacactgttacaaatacagtcactcacacagaagaaacttctgggcttaggggaaaaatactggcacagtacaaaggttggaaaaacctttagtaccagaaccacataaccaaaaattgactatgggtgtcactagcagttctaaaatacaggcagaagtaaaataggcaaggggtagggaaaaaagggaaattaaagaaaagggaactcaaagagtagaaaaaaaggaagacatggccagccgcggtggctcacacctgtaatcccagcacgttgggaggccgaggcgggtggatcacctgagagcaggaattcaagaccagcccgaccaacatggtgaaaccccatctctactaaaaacaaaaaattagccgggcgtgatggtgcatgcctgtaattccagctactcgggaggctgaggcaggagaatcgcttaaacccggaaggcggaggttgcggtgggccaagatggcaccattgcactcgagcctgggcaacaagcgaaactctaactcaaaaaaaaaaaaaaaaaaagagggagacatgaatgaagaagctagtgggaaagtaagtttaaaggtaagtaagacagtagattctgaagcagtatcccaaacagttcttgtgctatagggtgcctgagatgctggatcaaagaatggaaaaaggaaaagcaagtcaagagggtttggttccattcccaggttccacccctaactctattgtcattgaagtcatttccccttttggacttgtttccttatcagtaaaatagaaagaggatgatatatgcctctggtccaatctctcccaagggtttatgttgtgataaggtagaaatgagcagtcaatccatctaagggcagggaatctacatacaccaaactgattgtaatcattcatttaacactttctaaaacaagaaccttgggggtggggggagactcatgtagaacacatactgacacaactactcacacaacgacacgcacactcaagaatcagataaacacacaggtactgccacaggttgactaacgcacaaaccaaccgactaaacgctcagccccacacaaacacatctagagacagaggcatgccctagcaagtgagcctcattgttcctcaggaaagggagtttacaaaggaaacaaaaactctcatacacagccagagggagggcagagctctggctctgatgagaatccagccaaccaacagatacactctccccctgggaagagtcactcaatcaacaacacgtattaaggactcctgaggtagttattccataaaggaacttcgctggaacctctgctgcgcttagagaaatttcaggtttctattgcatttcctctttagactgtgcacccagacattttcccagagcaaccgccgcaattcaaagattcagaagagccagagactccttcagcaaaagctaggggaagagacttccaccccagaccacctccatttgattttcttcgaagaccgttaaaggagccaaggctcccggctgcgcagcggggttcgtggatgctgggtggccgttggaggggcaggctggcccttcccaggtgcgtgtggagcgcgcgctgggtagatgagtgtggaagggtccttggcccgacggccctctccagtgaggacgaggagtgtacctctggtgtgtgcagatgggtcagctccctcctggtggccgtgaggggtgcggtcacaactcaccagtgtgggggaggggagccagccactcacccagctgtgagagtggtgaaagagggaccagccaggggtggaaaagataattcgcagaacgatataggaaggtttctgagctcctcccctcccgcgggctaggggcgtggggagagccttcctccaacctctgacccgaccaaccgattcctcccgaaactctgggaacttacacaacaggatcgccaatatgaagaggcacaacagtttcctctcgacttgcgcctttgtccccatcgcgatcaggctcccgacacaacagccgccgaaggactcctgggaacagacacagctccgcgactacagcgaggggactgagagccagccgccaggtggaaccccgcccggccccgccctccgcgcctgattggccagctccccacccctgcacgttccgattggtgtaaggaaccgctgctcttcagaacgagtcacctcggccaggtgttaccccgccgccactccccgcctcggcgcactggcgcctttccccacaggagctgcctcagattggcccaggagactgtcgcgtcaggagacgaattccgcaccttcagcaggtgacggccccctgattggttggtgttcccgaagtagcgacttcctgactggctgggttctcagttggagctagagggctgagaagtacctctaaggaggaagtaggaaaggcagtcgtggtgtgggatttacggagaccggcttggcttggggttttgtgtttgtttgaatgtaagttgcttggtgcaactgcacctgcagtttggtcctgcagaaactttggtcctgcctcttggcaagtaaaaaacaaatattaatatgggagggtaggggagaagacccggagagaaatggaatgttactttggcaccacctccaaactgttcctctgtccaccccaccggctttgagagatgagctacgctgggaggaagaaaggggaaaaaaaagggaaagggagcactcaactggaaaatgggagcctgggcagtatagtcccagctacttgggaggctgaggtgggaggatggcttgagcccggaggcggaggttgcagtgagcctagatcgcgccactgaactacagcctgggcgacagagccagaccctgtctcaaaaaacaaacaacaacaacaaaaatttaaaaacccacaacaacacaacttgggaagagcagaattacgttatctcaagaagaaagttaaacagatgtacacaaaacacacccagatgatacaaactgagctgaacatgctctagaaacatctctgggtgactggatatgtcctttacacatatttgatctgtgaacaggtccctacatttcagaattgtttgttttctcactgtgactaatagttgtgtgctgactaagccaccttttttctatagacaatgttgatactcaaactttctgttaatatttatattgctacatcatttttaattgaaattcatgctcaacacctttgctagttgtagtttctattttacgatgatttaattttaactgtactaagcatatgcagactgtggggaaaaaacttccttagcattacctcattgcaagggaaaagaccacatttttatccaaaagaatgatattgtttgacattttgcctttttcacctttgctctcattcctttgtccccatctctttggccaaagttctgcttctggttccattcaatttaaaccacctactgggtgcttaatagtcttggccgggtgcgtggcacacgcctataatcccagcactttgggaggccgaggtgggtggatcacctgaggtcagtctgactaacgtggtgaaaccctgtctctactaaatacaaaaaaaattagccgggcgtggtggcacatgcctgtaatctgagctacttgggaggctgagacaggaaaatcgcttgtacctgggaggaggaggttgcagtgagctgaaatcgcgccattgcactccagcctgctgggcatcaagagcgaaactccgtctcaaaaaaaaaagaaaagaaaagaaagaaatttaaagtcttggagaaaggtatatacactgacagctgggctctgtgacgtgtgcctgtaatcccagctactcaggaggctgaggcaggaggggaggatcacttaaggccaggagtttgaaaccaaccagggcaacatagggaaaagactctgtgtctaagaaattttatttatttatttatttttgagacggagtcttgctctgtcgcccaggctgtagtgcagtggcgcgatctctgctcactgcaagctccgcctcccgggttcacgccattctcctgcctcagcctccggagtagctgggactacaggcgcccgccaccatgcctggctaatttttttttgtatttttagtaagacgggatttcaccgtgttagccaggatggtctcaatctcctgaccttgtgatccgcccgcctcggcctcccaaagtgctgggattacaggcgtgagccaccgcgcccagcctatttatttatttttatttttatttatttatttgttttttgagacggagtttcactcttgttgcccaggctggagtgcaatggcgcgatctcggctcaccgcaacctccgcctcccgagttcaagcgattctcctgcctcagcctccctagtagctgggattacaggcatgtgccaccacgcctgctaattttgtatttttagtagagacggggtttctccatattggtcaggctggtctcaaactcccgacctcaggtgatccgcccacctcggcctcccaaagtgctggggttacaggcatgagccaccgtgcccggcctttatttatttattttatttttgaaacagggtcttgctctgttgcccaggctagagtgcagtggtgcaatcatggctcactgcaacctccacctcctgggctcaagcaatcctcccacctcagtctcctgagtagatgggaccacaggcgttgccacatcctgctaattttttctttctttctttcttttccttccttcctttcttccttccttcctctctctctctcttttctttgtttttgttgttttgttctgtatacacgatgtcttgctatgtagcccaggctagtcttgaactcctgagctcaagtgatcctcccacctcagccttccaaagtgctgggattataggcgtgaaccaccatgccccgccagaaaattaaatttaaaattttttttaataaaaaattagctgggtatggtggtgtaacctgtaatcctgtactccggaggctgagacaagagaatcacttgtgcccaggaattcgaacctgcagtaagctatgattgcaccactgcactcctgcctgggcaaaggaacaagaaagatcctgcctcttaaaaatataaaaataaataaaaataaatttaaaaagcatgcattcacaaatataataatagccatgttacactattgagttatattcaatttacagcatactaaaatgggtaagccctttattttcacttgaactactgttaaattgggtctcccacatcctatacttatgcattttttttttcagatggagtattgctcttgttgcccaggctggagtgcaatggcgcgatcttggctcactgcaacctccgcctcccaggttcaaccgattctcttgcctcagcctcccaagtagctgggattataggccaccacgcctggctaattttgtatttttagtacgcggggtttttccatgttggtcaggctggtctcgaactcccgacctcaggtgatccgcccaactcggcctcccaaagtgttgggattacaggtgtaagccactgcgcccagccgcatttctttcttaaccaaagtacattttgcattgatctctattcaattttatattttctgttttgaaaatattaataatggacaagtatacatgaaatattgttaataactaaaatgaaaaaagtaaatacaaacagtgtgcacctcagttattactatataaaacatctgcatatacagttacaaagcatgaaggtattttagagcatgcaagtaatttgatgttcatcagattctttttcccataaagttgcttaaatgtataataaatgttaaaatttcattgtcattgacatttgttttccatagtccttcaaaacagatttgtaaactacagactgattagtttgtctgtaaagtagaaaattatggaaggaattattcaacagccccacgcacacacaaaaaaatagactgtgactatagacagttcaattgaaattctgcagagaaggccagcagagaaaaggagcaacagctgtaagggatgttgaataaacgcagagtaggtattttgtttagatggaaatacttgtgtgctaatagcaatgatccagtaaagagcaagaaattaatcgtgtggaaaagagaggccaggcacagtggctcatgcctacaatcccagcactttgggaggccaaggcaggagtattgcttgagcccaggagttccagaccggcctggggaacagagagagacaaaaaataaaaaataaaaaaaaattaaaaaattagccgggcatggcagtgcctgtggttccagctactccagaggttgaggtgggaggatcctttgagcctgggaggtggaggctgcagtgagccatgctcatgccactgcattccagcctgggtgacaaagcaagaccttctctcaaaaagggggtgggggaagaacagttatggtatcaagtaatagaggagagaagagatggcatcctgagctcaagttgagggttaaaagaaagcagagaaaactagccaccacaacgagagaagcatgtggtacagcttgtagatttgttggtgagaagataatggcaatttctttgatttcttcagaggtaaactcattagcttagagtgcagaggaaaaaggaagtttaggaaatctagagagtagggagaagtggagactgaaaaggtacacactagtgactgggctcagtggctcacacctataatcccagcattttgggaggccaggccaggcggatcacttgaattcaagaccggcctgaccaacaaggcaaaaccctgtctctactaaaaatataaaaattagctgggcgtggtagctcacgcctgtaatctcagctactcgggaggctgaggcacaagaatcacttgaacccaggagacagaggttacagtaagcagagatagcaccactacactccagcctgggttacagagtgacactctgtctcataaaaaaaggatacacactagagaagggtgttagaagctgggcgtggtggctcacatctgtaatcccagcactttgggaggccaaggcaggtgaatcacgtcaggagttcgagaccagcctggccaatatggtaaaacccccgtctctactaaaaatacaaaaattagccagtcgtagtggcgggcgcccgtagtcccagctacttgggaggctgagacagaagaatcacttgaacccaggaggcggaggttgcagtgagccaagatcgtgccactgcactccagcctgggtgacagagggagactccgtctcaaaaaaaaaaaaacagaaaaaaaaaaattgcatatctcttattacaagtgacctgagcatctccctggattaagagccagttgtgtctgggtgcagtggctcacgactataatcccagcactttgggaggccgaggcagatggatcacctgaggtcaggagttcaagaccagcctggccaacatatagtaaaaccctgtctctactaaaaatacaaaaattagctgggcatgatggtgcatgcctgtagtcccagctacttgagaagctgaggcaggagaatcacttgaacccgggaggtggaggttgcagtgagccgagatcatgccactgcactccagcctgggtgacagagcaagactgtctctccaaaaaaaaaaaaaaaaagagccagtggtattctgtgaattgtcccttcatatgctttgctcattttttaattaggatagttgttttttctgatccatttgtacatgttctttatatatccaaggaattagctatttgcatatgctctgaattgatttccccagtttgctgtttctcttttggcttgacttctgcagatgtgtttgtttcccatgcagaaggctttggcttgtttgttttgttctttatcagccttttatggcttctaaattttgagtcatagttagaaatattttcaccactttaaggtaatgaaagagtttgtactagtttgttctcatgctgctaataaagacatacgtgagactgagtaatttataaaggaaagaggtttaattgactcacagttccacatggctggggatgtctcacaatcatggcagaaggcaaatgaggagcaaagtcatgtcttacatggcagcaggcaagagagcttgtgtaggggaactcccctttataaaaccatcagttcttgtaagatgtattcactatcatgagaatagcataggaaagacctgtccccatgattcaattatctcccaccgggtccatcctacaacatgtggtaattatgggagctacaattcaacatgagattttggtggcgacacagccaaaccataccagaggtcttcttcttaatagtttacatttttgccttctcttttttttttttttttttttagacggagtctcattctgtcacccaggctggagtacagtggcgcgatctctgctcactgcaagctccgcctcccgggttcatgccattctcctgcctcagcctcccaagtagctgggactacaggtgcctgtcaccatgcctggctaattttttttttttttttttttttttgagacagagtctcactctgtcacccaggctggagtgcagtggtgggatctcggctcactgcaacctccacctcccgggttccagcaattctcctgcctcaggctcccaagtagctaggattacaggcgtgcaccaccacgcttggctaatttttgtatttttagtatagatggggtttcaccatgttgtccaggatagtctcgatctcctgacctcgtgatccacctgcctcggcctcccaaagtgcagggattacaggtgtgagccaccacaatcggccttttttttttttttttttttttgagatgaagtttcattcttgttgcccaggctggagtgaaatggcgcaatctcggcccacccttccacctcctgggttcaagcaattctcctgcttcaacttcctgagtagacgggattataggcatgcgccaccacgcccagctaattttgtatttttttagtagagacaaagtttctccatgttggtcaggctggtttcgaactcccgacctcagtgatctgcccgcctcatcctcccaaagtgctgggattacaggcatgagccaccatgcccagccgacattttttactttcaatctttcatccatttgaaatttatcttagtatagcgtatgggttacaaaacccatctgtatatccattcacgttgttttaattactaagaatttatttcatttcatttcattcatttatttatttagaggcaggggtctcactatgttgtccaggctagcctcaaactcccggtcccaagcaatcctcccacctcagccttctgagtagctgggactagagttatgtaccaccaagcccagctaatgaatcatatattcaggggagtcaaatcttttggcttccctgggccacactggaagaagaattgtcttgggctacacataaaatacactaacactggctgagtgcagtggctcacacctgtaatcccagcattctgggaggccaaggcgggtggattatttgaggtcaggagtttgagaccagtctggccaaaatggggaaacggtgtccctactaaaaatacaaaaattaggtgggcattgtggcaagtgcctggagtcccagctactcgagaggctgaagcaggagaatcacttgaacccaggaagcagaggttgcagtgagccaagattgtgccactgcactccagactcacacacacacacacacacacacacacacaaatcttataatgttttaagaaagtttctgcctctgcctctgcctctgccctttgcacggtcctcatctcccctttgcacggtctccctctgatgccgagccgaggctggactgtactgccgccatctcggctcactgcagcctccctgcctgattctcctgcctcagcctgctgagtgcctgggattgcaggcgcgccgccacacctgactggttttcgtattttttggtggagacgggatttcgccgtgttggccgggctggtctccagctcctgaccacgagtggtctgccagcctcggcctcccgaggtgccgggattgcaaacggagtctcgctcactcagtgctcaatgttgcccaggctggagtgcagtggcgtgatctcggatcgctacaacctccacctcccagccgcctgccttggcctcccaaagtgccgagattgcagcctctgtcccgccgccaccccgtctaggaagtgaggagcgtctctgcctggccgcccttcgtctgggatgtgaagagcccctctgcccggccgcccagtctgggaagtgaggagagcctcttcccggccgtcatcccgtctaggaagtgaggagcgtctctgcctggccgcccatcatctgggatgtggggagcgcctctgccccgccgccccttctgagatgtgaagaaagcctctgctcggccgcgaccccgtctgggaactgaggagtgtctctgccccgccgccaccccgtctgggaggtgaggagcgtctctgacaggccgccctgagaagtgaggagcccctctgcccggcagccgccccgtctgggaagtggggagcccctccacccggcagccgccccatccgggaggtggggggcagcccccgcccggccagccgccccgtccgggaggtggggggcagcccccgcccggccagccaccccgtccgggaggtggggggcgcctctgcccggcagccccgtctgggaagtgaggagcccctctgcccggccgccaccccgtctgggacgtgtacccaacagctcattgagaacgggccatgatgacaatggcggttttgtcgaatagaaaagggggaaatgtggggaaaagaaagagagatcagattgttactgtgtctgtgtagaaagcagtagacataggagactccattttgttctgcactaggaaaaattcttctgccttgggatgctgttaatctatagccttacccccaaccccgtgctctctgaaacatgtgctgtgtccactaagggttaaatggattaagggtagtgcaagatgtgctttgttaaataggtgcttgaaggcagcatacgcgttaagagtcatcaccactccctaatctcaactacccaaggacacaaacactgcagaaggcagcaggaccctctgcctaggaaaaccagagacctttgttcacatgtttatctgctgaccttccctccactattgtcctatgaccctgccaaatccccctctccgagaaacacccaggagtgatcaataaatactaaataaataaataaagtttatgaatttgtgttgggctgtattcaaagctgtcctgggccatgtgtggcccacaggccgtgggttggacaagcttgatatatatgaatagctggtggggcttgatgcccctcattgatgttctttttcaagcttttctggttattcttgttttcaactaaacatcatgatatatttacaaagttgagtcttcctatccaagaaccttttaagtcttttcttttttttttttttttttttttttgagacagagtctcgctctgttgcccaggctggaatgtagtggcacgatctcagctcactgcaacctccacctcctgggttcaagcgattctcttgcctcagcctccctagtagctaggattacaggcatgcaccactacgcctggccaatttttgtattttcagtagagacagggtttcaccatgttggccaggctggtcttgaactcctgacctcaagtgatccacccacctcggcctcccagagtgctaggattccaggcgtgagccaccgcacccagcccagtcttttcatttttacaagtctaattttaggtctttttattgtatttttaccactttcttcatacaggtcttgaactttcttaataagtatattcctagttatgcaaaggaatgatgacaattacgaatcatgtatagaatctaaactcaattaggaggaaaatatgggcatgaggaaagttgtaaaaatttggtaaggtcaattaattgaaggatttgataggttcaagcatatgattaggaatggaaatgctagtagaatgagctggaaggatttcttattgggaaataccatcaggcctcgtttcttaggattttccattttcttggcttatcttcactttaaagtctctggccatgagctcaacatgtattttctttgaattttaaaaatctgttttgctgtagtctatttcttgtgtctaactgtgcttagtggtttttttttcctttggttaatatgaatttcaggaggcatgatctattacttctcatgtaaatactaaccaaaatcgaagtggtatagttgtactaatagcagataaaatggatttgaaggtaggaagcatccccagggataaagagggacacagtgagaaagggatcaatccaggagggaagcataacaattctaaatttgtatacatcaaataacatagcctccaaaatatataaagtaaaactgaacagaactaaaaagaaaaatggtcaaatccaaatcatagtgagatatttaaatacacctctgtaagtaactggtagaacaagcagaaaaaaacaatcagtagagagatagacttgggccaggttcagtggctcatgcctgtaatcccaacaccttgggaggctgtggtgggaggactgcttgagcccaggagttcaagaccagcctgggcaacatagcaggaccttgtctcaaaaaaaaaaacgagagagagagaaagaaagaaaaagggaaggaaaaggaaggggaggggaggggagggaagggagaaggaaggccaaaaaaaaaagagatagatttgaacaacataatttagtaaattggacctaaccgacatatatagaacactgcacccaaaagctgcagaatacaccttcttttcaagtgttcagtgaccatttacaaaaactggccataaagcaaatctcaacactttttaaatgattcatatcatacagtatatattttcctactgagtacctctcatatgccaggttatagttttactgttggccatacaataataaaataaagtccctcctcttagagagctcaggctattttgctccccctcacccccacccacttcaataagctggtctagaaagctcagtctaaagtgggaagaaccatgcaatgtgataagtgctacaatagaggtacatactttatccatttttcccatgtcttatgtccttcatggaattcagctatataattttatctggttatttttctcccctctccttcagtttaaaagccatcttgatgaaaacaacaagtctcatgccaaaaaaattctgctaattcttgtgaaattcagagtggtacaaaggagactggaaacttcccaaacagggaaaatggcaagtaaaggccagggtcaggaaggagtagggcctacttaggacacgaagaaaaccagcttgtggggagcagccactggaagataaatttggaaaggcaaggtgacaccagatctagactacagattgctcaaaaggccaggctgagacaagtgcttgagccactagacaacaaggacctattataaattatcaattctgactaagataaaaatgttattttaagatcaggcaggcagtgattcttcagaaaggctgaaattagaagattctgaaggtcggaaggctagtgaggctcagcagacacctactgagaagtcatgtttgaggcactggaggtaagaaagtgaaagccagtccctccctttgagaaactcacaatcaattaggagagacaaacaaatgaacaagaaaaatgtggtgtaatagaaatgatgacacacatttgtggtaaatataaacgtgggagagatacaggatgaaagggcagagtttaatttagtatgaaaaggaaggtgtaaggcaagagaagtgcatatagctggtaaactccaagacttcaacctcacctgctgaaatagttgtgaggaaagggaaagagaattttaaaaggcaagataatggcttggaacagcctatcggggttatgaaccaaacagctaatgaaggagaaagaggaatgttctcttaatgttgatcaagccagagggcatggttatgtaatgagccaggtccgtttacttccaggattctctctaaacctcatcagttataaaactgaagaaagcagctgggcgtggtggctcacacctgtaatcccagcactttgggaggcaggtggatcacaaggtcaggagttcgagaccagcctggccaatatggtgaaaccccatctctactaaaaatacaaaaattagctgggcgtggtggtgggcgcctgtagtcccaggtacttgggaggctgaggcaggagaataacttgaacccgggaggtggagcttacagtgagccaagattgcaccactgcactccagcctgggtgacagagccagactccatctcaaaaaaacacctgaagaaagcaaatggctacttttttttttttttttttttttttttttttgagacagggtctcactctgtcacacaaactggagtgcagtgcataatcatggctcactgcagtctcaacctcctggtctcaagcaatcctcctgcctcagcctcctaagtagctgggactacaggcgtgcaccaccatacccagctaattttttgcagagatgaggtcacactatgttgcccaggctggtcttgaactatttgcctcaggcaatcctcttgcatcagcctcccaaagtgctggtattataggcgtgagtcaccacacctggctaaaaactactttatggtgataaaagataaagcggttacctagaaagggggtagggtgggattgactagaaaaggccacctagagatattctggggatttccatgttcaagattgtgtttaggatggtggttacaagtgagtatattcaaaattcagtgaattgaatgcttaagaattgtgcattttggccaggcacggtggctcacgcctgtaatcccagcactttgggaggccaaggtgggcggatcacctgaggtcgggagttcgagaccagcctgaccaacatggagaaaacccgtctctattaaaaatacaaaattagctgggcgtggtgacgcatgcctataatcccagctactcaggaggctgaggcaggagaatcacttgaacccaggaggcggaggttgtggtgagccaagatcgcacccttgcactccagcctgggcaacaagagtgaaactctgtctcataaataaataaataaataaataaataaataaataaataaataaaataaagactattctagtcgagtgcggtggctcacgcctgtaatcccagcactttgagaggctgaggtgggcggattacctgagggtgggagtttgagactgggcggattacctgagggtgggagtttgagacgagcctgaccaacatggagaaatcccatctctactaaaaatacaaaattagccaggcatggtggcacatgtctgtaatcccagctactcgggaggctgaggcaggacaatcacttgaaccccggaggcagaggttgcagtgagctgagatcgccccattgcactccagcctgggcaacaagagcgaaactgtgtctcaaaaacaaaaaagactattccaactggcccactatcctcaatggatacctcaatggcgagtttgtggggggctgtgacattcttatgcatatgtactagaatgggtacctggtgaaagaactgaaaaagctggggctctgttctgcccttttagattaaaagaaagaccaagactccaagtgagggcgcctgggcctcaatgaacagagagggggccgttcatgtcagagactccctgccagaaaagcctttccaattttggttttcattactgagacaacaactgcttgcactgatcatttcagttcatgagcagtctagtgattttagtttgtctggtgtttgggttaagaatattttattgtgaacttaattacaaccactgcactgtaataattaatgctatattatgatattgttgcaaacaaaattcattcttatattgtcatttattctttgcccaattcaggagttaaagtaggggctttgaaatcattattattcatgacccctcttgcagactgtgtcagtctgcaaggacagtatcttcctccaaattttgtgtagcttcttttgttatggaaaatggactaaaaagaaactgtgataactggggcgttgtttttttaaaataaactgccaaccacagggtaaaaaaagaaaatggtgcatttttttttttttttttgagacagagtctcgctctgtcgcccaggctggagtacagtctcgtgacctcggctcactgcaacctctgcctcctgggttcaagcaattctcatgcctatgcctcagccaccagagtagctgggactacaagcgagcaccaccaggcctagctaatttttgtatttttagtagagacagggtttcaccatgttgaccaggctgatcttgaactcctggcctcaagagatccgcccgcctcggcttcccaaagtgctaggattacaggcatgaaccaccatactgggccaagaattgtgcgttttattgttaagtaaattatgccaataataataataaaatgctataaccaaattataataaagacctgtggaggggaaaactcgtctctactaaaaacacaaaattagctgggtatggtggcgcatatctgtaatcccagctactcgggaggctgaggcaggagaattgcttgaacccgggaggcagaggctgcggtgagctgagatcacgccattgcactccagcctgggcaacaagagcaaaactccgtctcaaaaataaataaatgaatgaatgaatgtaggagggctgggtatagtagagaaggcagaagggaagaaaaggaggtgagagacaggcaaggaatgcaggaaatgcctgaaagaagttcttcagaggcatgaaaaatcagaaaactggattcatttctgactcaatcttctcttccacagattaaggaatacattttccaaaaatcaaacttaagaagtaaaaactctgccatgaaaatatttaaaatgtattatgcatcaaactatacactatactagagggaagtcatatacctactgtgtagtgctgaattttgtttcagtaagcatgtgtaatttcatctttttaaccaattaaattttggtttttttgagactgagtctctctctgtcacccaggctggagtgcagtggcactatctcagctcactgcaatatctgcctcctgggttcaggcaattttcctgcctcagcctcccaagtagctgggactacaggtgtgcaccaccacacctggctaatttttttatttttggtagacatggggtttcaccatgctgggcaggctggtctcaaactcctgacctcaggtgatccgctgccttggcctcctaaagtgctgggattacaggcatgagccaccgtgcctggccaaccaattaaatttgttaaatccagtataagagatcagtgttgataaaaacagaaacctgaggccgggcgcagtggctcacgcctgtaatcccagcactttgggaggccgaggtgggcggatcatgaggtcaggagatcgagaccatcctggctaacacggtgaaaccccgtctctactaaaaaaaaatacaaaaaattagctgggcgtggtggcgggcacctgtagtcccagctactcaggagcctgaggcaggagaatggcgtgaacccgggagactgagcttgcagtgagccgagatcgtgccactgcactccagcctgggtgacagagcaagactctgtctcaaaaaaaaaaaaaaaacgaaacctggttttggtggcacaggaaaggctcctcacacctgtaatctgtgcatgacacatcagtagggatgaagggttccatccattccctcacccaaaggcctgggattgccctttcacctcctcaatccatggacaaagcagccatagacaataaccaaagttcacagcagcacagccagttggggccatagtttgctgacctctggtctacagcagtggtacctgcttctggctgtatatgagaatcaccccaggggcccataaagccactaatgctcaggctccaccctccatattctgaattaaaaaataaaacaaacaaaaaaacctactaggtgattctgatgtgcattctgggctgaaaacagctattctagaagaactgtacattgtagcctctcaggaaactgctagaatgttgcatgtggggagtgctagggggaagcagatgaatgctgcgaaatgatgatccagggctgaattgaggtctagataaagattagaactgttttcagtccacctgacacattaagtgcttccaatactttgattaaatgttctttatttgatgcttttgtgtgcacaacactataaggagttgcccaattcaccaagtcagcccgttcacacccttagttaaggtggccattaaggggccagggggtggcaatcagtaagctgcctcctgcctaactctctttctccaaccattctctataggctccagcgtagttgcgagccctgtggagacaaagaagcgtgagagactgacaggaatgacaggcagtccccatcacctcccagctagcagccacacctccccgtacccagtgtatccaagactccgggccagctgcgtggcctggaggccccgcttgcccatctgacagaagaaaacgagatgctcatcttccagctttggcttctcagcagaatataaagcctggaaggcagctggctccatctgcagagcactctccaactcggacactggaggagtggagagggtagaagggaaagccagcaatttggcactcaggttcggaagctgggcctggaagggctgggtcctgggggcccccaaacaacatatgataaccatcccctacccccaccccaatttcaaggaacagaaaccgacaacttttgaatgcaagccactccctaagctgtgaggaggcggggcgggatgccccctcaggcgtccagatttggggaggtcaagagaagctggtctgcccctctcctctccgcctgctgtcttctcaaactggatgggccagttccgatgccaagatccgccccccatcagtccttcctacggaagctgagggctggctcccgggaatgcaggacccccataatcagtgccttccccattccatcctaaatgaggtcccattggcaaagaacctcctgaacggtctctattccaccacctgggcgtcccctctccaccctatacccgggatgttgagcgcccctgggatggtcccagctgccgcctcctcgcgagagcgcacgtcgaagagccgggcccgtccggaggctaggagtgaacggagttcaggaagcgagaccgtgggcgctgaggaaggggcgcgacagccttcaggaagagggggcctaggagtcacggccgccatggcatcccctcacctggcagcgcccctcccggtagggtgtgcacgaagacccctcagccacgccccttcgctccgccaccccactccctgccacgcctcaacccagaggaccaagagaaccgcggccccaggaatcccccgcaggtacctccagccatggtgcgcgtagcaaccgcgagtctccggagtgcggccctggcccgccctctcggcgcctgcaacatctcccgttccctcccagagctgagaccggatccggaagcaagggcaccgcctcccgcgccgcccccgcagcacctgttcgcggcgcctctagcaccaacccaccgcagaagcccttaacattctctagcttgggccaaaaacgacacaccggtctggcccaggaaccaggactccgggtaataaatgcaggagcagcaccccaccctgaacttggcacagcccttactggtcgaagagcaatgtgcccctcccttccagcccgtggcccacaaaaggaagaaaaacagacaactgtggctttgaacaattttatcttaaaaaaaaaaaaaaaaaaaaaaaaaaaagaaaagaaaaaaaaaaaacgacccccacaagggggaaggccccaagtgggcccctgcctgttgttctctctggctccagagatgtctgcataggcctcagcttctcactggccaatctcctcttcatgggcaccagccactgctaaacatccttccctcacttcttgtgtaagcttgctcccctgagccacaggttgcacatctaaacctcagctccagggaaaggaagaaccaatggaagtgccagagtcctggggcaagccagagcatcacctgtcagcaaacctctgctgggcactctaagcaagcacaggacaagccccagagtttagtgtgtccagtatccagcatggagacagcacatgcattgtgcgagaggagcacaagggcccaggggctgcatggtgggggtgggcaaggctgtcagtgcacgtccacattgtgtgtttcacaccactgcaggccgccatatcacagggcctcagttcaaggacacaccttctgaacttccccctgtcccatgccagaagtggggcagtgaaggaaaggggcacgggattaggctgttgctcctgggctatctgcagttcttgggcccaaagcccctgaatccccatagttagttgctgtcattcttgatgacgacctctaatccgtggtgccgcaactgagctcgaagcagcagattcttgtttttaagatcttccacctgacatgggaaggaggcagtaaagggaatgggtagtaaagctggcacttccaagcccctgaatgtattcagacatccactggtgagggggaaaagatgaagccttctccatggagaacaaagtagagggtgtcaaactgggtcagtggctagcagaactgagaagggctgcactgggggtaggagtctgacctgttgtcgaagcacgtcattgtccagctgcagttggtcaagtccctgcagttcttcagacaagcggtggttactctgccgaagctcctggatataatcacaagctttggatagaatcccacctttactctgcaagataaggtcaacaaaatgagaactaggatttcagatacccagcttgctttccaaaagtaggttcacactttggacctcattttcatctaaggaaggtggtataatatctcccagggatacaggaacctcagggagagataagactact

SEQ ID NO: 194 - DNA, 13714 bp, Homo sapiens
  source 1..13714: mol_type = genomic DNA
tcctgagagatgatggcatattcagagaaatttgaaaaagtctgttatgggctagatttgggctacagacagagttgtgatcagaggccaggaactaaatgatagatgccgatgaagagtcttctattactcaagtaggacaggtgctccaggtggctggggtgggggctgggaatatgtaaggcaagagggcacaatgcccaccgccaaccccaccttcccctaagggcactgtagacactggctgagcccaaaccccagctcctctgccactaggggagagttctatctccctggtcctagtttctgaatctgtcaaatgggaagaacaatacccatctcgggttttattgactcattttgactcattggtttgtttgtttgatgaggattaaatgagatgacaaatatctaactcttggggcattgcagtattcagtgcaagttagacccctgccccatcacttttcccttggaagctcccatcccaggaggcaagggatcctctctgacgacgaaggtgtgctgtttgtgcaacatacctgagggacagtgtggctggaggggtgggagccaggcactgaggatgcacttgctgtttacagattgttttatgactggctgttggagctcctaaaatggctcaggagccaaccaaccattttactctatgttctgatttgtttattcattcattcattcagtcagtcagtcattaagcatgtattatgtgcctactgcatgcaaagatacatgggggattcaacctttctacttaaccttatctcacctcactccctgcagcgaactctcttcgccgctgcactgagcttctcactgtctccgctctccaaaatgcctaacactctccgtctcagtgccttgactcaaggtatggctgtagccatcactgctgcctctcacccctgaaacaaagcagcatgttagaaggatttgggttcagagtcaggaggtaaggattcaaatcttggctctgtctctcactagctgttaaggtctttagtctacctgagccccagtttcctcatctgccagatgggaatgacattaggatctatcacagaaggttgttgtgagaataaatactatgagatgtgtaagatatctattatggctaagtcagtgcctggcctggagttgaaacttagtaacaaatgtctgttgaatggacctgatgaattctggcctgggaggtgggaaacttgaatcttggtcacaggaatatgtgcttgaataagtcactgcttttctcaaggggctccaatcccttgattaaaatggcaggcttggatcaccagaatgccaagtattgacatccctggcttcccatcctgtgattctgacctggatccagggacacttggcacacagccggcttcatctccatcctccctcagggaagacatcactagtagatcagagtgttctgtctactgagcccttggaatctctccacagggcacctgccagtcatcgccaatcaaacccgagatgacagttgagatcaaacagacttttcattcctggttggtgcctgggagagtgacgaggcctatcagtactggaggacacagtcaaggtgatgggtgtgtgggggtgggggagcgtgcagagcaggggcgtgaatgtggggcggtggtccatctgggatgccccgcagggcagagacaccactaccatgtcacttttgtcccaccagcccttctttacagcttcacctgagcagccattatatccagcccaggggagaggcaaaggcaagggaagggcaccgactatgaaccaggagattgatgtgtttgttgagttttcatggctgatgtcttaatcctcattatcaaccctgccagggaactgcccttagctacacttcaagggtgaggaataggaggctcagagcttactgatcatgatgattaatcataaaatcacagtaattggcttgggttgcacttcagcttcaccccttttggctgtggggtcttcgtcaagtcacttagtcaacctgtgcctcagtgtcctcatttgtaaagtaggcgtaatagcaatatccacctcattatgaaggagttaatacagaagaagtttttgaaacattattagcatttaataagaggtgagtaaactattttcaaggctgttggcatggatttcgtattcattttgctacccccagcacttcagagaatgtcctgtacatagtaggtgtccactaaatgctttagaaccacttggtgagcattattgactccccagggaagtcccacgtgggtcttcttgttgccgagaaagtcccacataggtctttctcgttgccaaagaggacatctcaaagaaaataacaaaaatatactgagccaaagaaaaatgcaaacacaacatatcaaaatttgtgagatgcggccaaagcagtgctgagaggaaattttatagcactaagaggcctacattagaaaacaagaaagatctcaatcaatgatcaaagccatgccctcagaaaaagaaaagtgaaataagcccaaagcaagaagaagaaaggaagtaataaagataaaagcagaagtcaatgatattgaaaacagaaaaagaaataaaaataaaaaataaaaaataaaaaaagagctggttctttaaacagatcaatcaaattaacaagcttctagcaaggctgaccaaaagagagaagacatagattatgatattagaagtgaaatgcagtcaggtgtggtggctcatacctgtaatcccagcacttttggaggctgagatgggaggatagcttgagctcaggggtttgagaccagcctgggaaaaacagtaagacctcctctctacaaaaaatttttaaaaattagctggatgtgttggcgtgaacctgtagtctcagctacttgggacgctgaggtgggaggattgcttgagtccaggaggtcaagacaccgcagtgtgccacaattgtgccactgcactgcagtgacagagcaagaccttgtctcaaaaaaagaagaaagaaagaaagagagagaggaaggaaggaaggaaggaaagaaggaaagaaggaagaaagggagggagggaggaaaagacagaaaagcaggctaaaatagtaaatgttatgatgttatatcttagcatagtacaaattgtaaataggctaaagaaaaaaacacatgatcatataaattgatgcaaaaaattcatctgacaaaatttaacatccattcacgacaagaactcccagaaaattaggaatagaagaaagtatcctcaacttgataaagaggatctacaaaattcccacagctacatcatatcccatggtgaaagaccaaaagcttttcccctaaaatcaggaacaagacacagaggtctgtttgcaccactcttcttcaacatagaactctttgcctgaaccccatccctcctgagactccacatggtgaagatgggctgagctctcctcttttcctggggcttgagtcctcagactcaccagctctaaccccactcattcatatccctttcaagaatgcacaggggagtgtaagtgggcttacctgattttatgatgttgaatctgctcagatttatactaggaaaaaccaaatcatttgccaaatataagtagcaccgacttgtggcacgctatcatatagcactgtatcacgatagcaccatatcaatacccatgtgtgcagcacagaggtcaagcattgatgatgtaattcaaccaggaaactgaggcccagagagggtgagtgactacctcaagatcacacagccaggtaggggcagagttcaaagatcttatctctgaagcccgtctccctttcatggtacaataatatggttgaaagcacttccaacgtgggacttgatcacattgatagtggtctctgtcactggaggtggactgcagccaggggtgctggggctggctgagccggcctgtgactactctggggcattacaaggtctctgcctcctctgagggcacagccacaccaggcaacttcaccagcacaggaagccctcggcctgccagccagaggggttggctttgacctggtgcctcctgttcccaggaagcaagaagcacgtccactctgattatagctgacagcctgccgtgggctggtctttgatagaaatgctgccattatgtaagaggttacataaatcatcttgtgatgtctgcgtcgcatgtccacagaggcgctgccaggccactctgtcctccgcgtggcctttgttatgttccccgagctggtgtggtcggtcgggcctaactctccagggcaggggtggctgggaagagtctgtagccctgggctagcaaggcccctgggagggagatggggccctcatattggttcacagttgtcggtgggagcagcatcttaggatcactcccaccctagctttgtcatttactgcccatgggaccttcagcaagtctcctagcccaatttgtgcctcaacttcctcatccattaaagagagtaaccgtggcaactgggaagaacaaatgacaatatatgacacatatttccatcaagtaggactttacactcatatgatgaggtgtgagaaacagcacagggtggctggcagagcagagctccctcccaggtgcttctcctacctggctctgcctggctttgccttggatgaatctcttcccctctctgggcctctctgtcttcatctctaaaatgagaagtcagcccatcttttgggactgaattttctgtagaggtgtgaaaatgtaaaatctcctttaacatttatttttggcaatttaaaacattaccaaacatgtaccaacaaacagatacatttaaacgcattttaactcacaaggtgacacgctaggctgctgactggtgaacttgggcagtcaggttaactcctgtggggaccaggtaatagtttctccagggactcctttcatttgatgaccatcctaagatcataagagaagcttttttaggctgggcgtggtagctgaaagctgtaatcccagcactttgggaggctgaggcaggcggatcacctgaggtcaggattttgagaccagcctggccaacatggtgaaaccctgtctctactaaaaatacaaaaattagccaggggtggtggcacacgtctgtaatcccagctactcaggaggctgaggcaggagaatcacttgaacctgggaagcagaggttgcagtgagccgagatcgcaccattgcactagagcctgggtgacagagcgagactctatctcaaaaaataaattaattaaaagataaacttttttagaaagttgacatctcaactgcttctctctctaaaccaagattttgtaaatgttctgcaaccaaaacaaagtatggctgatggctgatgtgagaccataatccatatctcctgatttcaaagttttatatcatcagaacagactccttgttctaatgcattgtttgcaaataagtagaaggtatgcatttgagcatggaaaataaatttgtactcatagcccatagttgtcatggttttacatgttgaatctccacattttttttttttgagatgaagtctcactcttgtcccccaggctggagtgcaatggcacaatctcagctcactgcaacatctgcctcctgggttcaaatgattctcctgcctcagcctcccgagtagctgggattacaggcacccgccaccacacctagctaatttttgtgtttttagtagagacggggtttcaccatgttggccaggctggtctcgaactcctgacctcaggtgatccatccgtgtcggcctcccaaagtgctgggattacaggcgtgagccactgcgcccggctgaatctccacatatttttaaatgggcatctctgcttcaaagcaatttgaaaacccactgccccagatgagctccttgggtccctaaggcttggcctgtgcatgccctgccagatgcctcttctcacttgcagctccagtctacacatgtgctggctgaatcctataagtagatggtgtctgttgacatccagaggttctggaggggtggctcccaggagactgctaggtagttgttctgcttcactgatgagtgggcaggagacaaacgtttacttatcaagataaagcagggaatgccacctccacaccctctggtccctgcacacagtaggtgttgaatggagttgatgcaaagctgggagtccctgctgcagggtcagcacagtggactgtcgggaaaccaaggcagcaacaaccggttgggaagggtccatcagcggcccagcttatccaagttcagggcagttgaagccagcacagctcatgtgcctttaacagagctttacagaactcgggctctggtgctgggcgatgcagtcggaaagaagcgcttccagctttcatgtgccatagtcctgtaggattacagacaattcgttgtcatgtaagccatagcaaccacaagcatccttcactcaggcctgctgtgtgctgagtccattcaagtcacaggagatacagagacagaaagctgtgaaagaactcccttcccttctggagctcacctggatggggcaaacaataaacagacaaaatttaaaaaaataagacaggaagcagctgtttacggttcacaggaaaaatcctgctcattggaatgggcaaagtatttaattcttaaaacatttagtaagaagctactctgtgccaggctctagtaggagtcagattacaaagggccttctgcatttagctaaggaggttagacttcatctttgactctaggaacacagggatgggagagggcgttattaacaatgctaggagttggcggaaggcatcctggaggagggggtgtttgagctgggcctttaagaatggctgagaggacagggttggctgagttgggcccaagaatcaggtttgaggcttctgtgggtgtgtcaccaactgtaaatgggaaaaataatcccctctctgcccagacccaggacaataatgagagaacactgggagagtcttatgactggtgtgattactgctgtctttccacctgcctatatggccaatcagaaaacacagaggagccttcccttgtgtgggtcagaggcatccagaggcctggcctcaagccacagttgcctcctctccctgctcctgacttcccaaagctgcagctcccatattcctgagttgggaaggtccaacattgtgctagaagagtggaacccaggacgcatggagaaaatctggtcttcctggccggcagcgcttaggcagcatctggtgctcacgggagctccaggaggcaatgtggccaggcagatccaactcagcctttggacacagacgggcctggcttcaagttcaagctctgctggttaacagctgtgaagccttgggaaagtaactcaacctcacttcatttgtcagggcaaccacaacactaccctcacggagctgccccgagggtcaggtgaggtcttcatgtggttgtggaatacggctcttggcacatgctgggtgtccacaaagaatccattttcttccacttttctctccctttcctttctctcttccctcttttcttccttctctgtttcctcaaaaagtgtttggtggaagaacagcccacattaagagctttggaaagactttcgtaagacaccaactcacctcccacggagtccacgggcctggtggggaggcttactactggctaagaaaggagagacagcttcatgagcgggcagtgcagaatgggccagcagggctgcaggtgccgtgggatctcaaggaagctgggagctgagctgagtggctctaaaatgtcttgatgcccttagaagagagaagatcttctggagagaggaatgatgcagcccccacaaatcacagaaggcctggggagaaaagggcgagcacagcaaagcaggtggttacgtagtcagatgccagctgctggagaggttcaaactgttggctgtgcacaccagcctcacacagtaggcagcagggagctggccctggtggccacaggccctcagggcgctctcttcagccacgcgtgccagatgttttggagcagaaaggatgtttcctgcttgtaccagtcagggtgggctgggacgtgctgcagaaacacatagccctcaaatctctggcacttaaaatgatgatggtttggctctcacccatgcaaaggttgccgcaggcaggagcaaccctccagggcacgtagtggccaacaatctaggatgcgtcagtccagcggcacttccatctcggtccacacttccccgaccccgcagcagggtaggggcatggagaatacagtgctggctttcaaggcctaaattgagtcacagcttgtcagcaccgggccatctcctccaaacccttcattttgcctgtaaggaccctcaggccaggggtaggggagatggcttggagtcaggccacagcagctgtctattggccagtgggaaggagcagggccatcacttctggatggaggccctggctctgccctgccaatgcccccagtctgggtagggagactccagggaggagtcctgcaacctaagatgccaaatcttaggttgtagtacagaggtgtgggttggcgcacaggccaccagccatctggctggtgagggagacaggaggagaaggcagtagaaggggaagagaaaaggaaggggaaggagaggaggagggaagaggaggctgagtctgggcagaaaaatgatgaggcgtgaaaggggcccgtgagctgggctggcacggaggcacgaccattagcatttcccaggcggccgccctcgccttcagcctcaccttccctctggccagttggtgggcagggccaacagcggctctgggctcccttgcttgctcagagtggccctgcttgcagccccgccggcgttggcacggtgacagtagccaagtgtgcaaacttgtcccattgtccgcaggccagggggagccatggaaactggctaatatgacacaggaaaatgtttgctgatggcaattctatgggctttgtccacctctttctccatcatgacgactcgatttaagtccctaactgtttgactacaaatgcaaggggaccgtgcaacgccaaccttttgtccggctgcgctgaatgggcaattcaggctttgtgcagctcaattgaggaagcaaacataaagacaagattcctgagagctccagctcccttcccatggatatcccagcacctcgttagagagtccttcctcggccaccttttccgacaggcatcagcgcacctcctgaccttgaaggccctccatccccgatccctgggggatcctggcagggagggtggtgggggtggcagggggagacagagagagagacagagagacaggagaagagagagtgagagcgagagagccactcaacactcaaggacagcgggaaaagcagcccgccccggcttaccccgtccgattgtctgtccgcactggagcatggcagctgtaggcctggagtctttgggggaggtttgcaagcctgtctccactaggcccagccccttctcaatcctggacattttaaacacacacacacacacacacacacacacaccccacccccttgagaaaccagggaactgaggtcaaggggaggaggggggtggaggctgaggagagtggggctgaagggtagaaatttaccgggaaatgattgcatttgggagctgtcttttttgtgatggtccccatggtgacaatttgtgacggcaaagaatgtgggaacggggcgccgccgcctgattgggatgctttgtatctggagaggcgctcctgattggcctgaggggccccccagctccggggagttgtcctccattcagcccactcaagggttgcacaactgcttccagccggacggagctcggccggctgcgccggggcctgtcccaggtctgcagtggggaacctgccgggccacgttggtggggcctgggccgcaccttcggtcagtgtggaggcccggtggctctggcccgactgggtggcgggtgtgggggcaggctggggcctgggggaggggcgaggtgccgtgggtggcggccgaggaggcatgaaattgctgcagatgcttcttcgggggaatccctgctgcccgcagcctgagatcagcccgcaaggcaggtctcgattaagtgccagacaggggtcctgcctggtcctgcgtgagagctgggggtggagcgtggggactgaggaggggggctggtgctcctcgtgctgggggcaggagtggtgggagggggaggctaccaccagggaggaagggggcttggccttgctttaaagaggaacagttgcctcagctcagagaataaacacctcgctggcaagttgcacacgttggcagcgtggtgtgtgggagatggggcaggctgggagtgtgtgccagccccagcaatgccacctgtagctgggtcaccttgggcgacttgcttgacctttctgagccttggctgcaagaaggggcaccagacccaagcaggctgggcgaggctctgctggtgcctgccgcatcccaggtgtgcaggaagtgctcagccacttgcacccacatccctctacccaggactctgtttagggctgagaggtgctggggtggggagactgtttgtagacaggtgctgtggtcttttgggagggctgggtgtggttgcttggagagactccgatggcctgttttgtcccccaggtcagctcggtgcccttccttggagctgccggccaccagcagagcctaccctcttcatggaaagcctcgtgcagtggccccctggtgatggcatccgacagtgatgtgaagatgctgctgaacttcgtgaacctggcgtccagcgacatcaaggcagccctggataagtccgcaccctgccgccgctccgtggaccatcgcaagtacctgcagaagcagctcaagcgcttctcccagaagtattcccggctcccgcggggccttcctggcagagctgctgagccctacctgaaaagggggtctgaggaccggcccaggaggctgctcctggatttgggccctgattccagccccggcgggggtgggggctgcaaggagaaggtgctgaggaacccctacagggaggaatgtcttgctaaggagcagctcccacagaggcagcatccagaagctgcccagcctggccaggtgcccatgaggaaaagacagctgcccgcttccttctgggaagagccaaggcccacccacagctaccatgtggggctggaggggggactgggccccagggagggacctccctatgagggtaagaaaaattgcaagggcttggagcccctgggacctgagactaccctggtgtccatgtctccaagggccctggctgaaaaggagccgctcaagatgcctggggtctccttggtgggccgcgtcaatgcctggagttgctgccccttccagtaccatggacagcccatctatccgggccccctgggggcactgcctcagagtcctgtccccagcctgggcctttggaggaagagcccagcctttcccggggagctggcgcacctctgcaaggatgtggacggcctggggcagaaggtgtgcaggcccgtggtgctgaaacccatccccaccaagccagccgtgcccccacccatcttcaatgtctttggctacctctagccacgcggagagggcctcagcccccacctctggcctgcaggagtgtcgaggtccccgaggcgctctcctgtgaggaggtggctgggccacagtgtggcctcttccgtttgtgtgcgcatgggagtggagggcaggattggggcagggctcctcaggcagtgacccttcagccttgcagccttggaagctgggaggctggacctggttggcccctccccaggcaggccagggcccagcagcttgtcccgctgtccctgtgcagaccataggtactgggatgttgcccttccttgccttgcagtcaccccagaagccagagagacgcatctgtttacctgccacccactctgcgagccaatctcagttgttgttcttgttcttcttgttctttgtaaatattgagaaagttaaaagaataaagacatttcttttggagtttccatatcttgggtgtcatgaagttgaatgagccccacccaggctgagggctgctggcagaggtggctggtttcagggaggccaggagcggctgaaacctctgagatatccgggaatgggcgctgggggccaagatcttggttcaaaggaaggagggtgaggaggggagcggaggagccactagggaaggacatgctggcgtggacccccaagggggtccaacgtgctctggagaataggtgctggaaccaggggaggtggggctgcagtatcagcgccgccctgtgctgtgcggccagacgcttcctctgggggtctccttgccccacctgcaggacagtgagatgagaatgggtctctctgcagtgtcttctgctctgtgtacagccgcagggcagcctctgtgccaaggtggttgtgcccaactctggtcagagggaaaatcaggccaaacaggagtttggtccctgtggacaaaacagggggcttgaccaaattgtttctcttgtaagcatggtcttggagtctatgtccatggggaaaataaatcaatttaaaaaataatagcgaattcccctaaacctcgttctctctggcacatacaaaaggatcctctctagctaattcagactccaggttacctgctgatgggtctctccccgggcctggcacacaccaggtgccccatcaatggaataatgaggcctctgcctgtgacagtgcagaggggagcattggtggcaggaagtggctctggattttgccgttagtgtcctactagcaaagctacctgaggggcctccacctgcacacaggcccagattttctctgctgctgtggacgtggctccacggctgagagagggtgggcctgctggcctgccgagctgcttattttatcagaacacagtttccacaactaagaagggtgcagcaggccagtcccggctggggactacggtgctctcatcaacagcgtgatgctggacaagttaatcctcactctgtgcctcagtctcctcatctctacaatgggggactaggaaacaggtgcaacgacctcttcttcaccccaggcaagtgttggctggttgcaggatcccttctttggagtccagacatggcctctgattcttcctcattaacacaggatgcaggatccatggtcaccaagggcccctcctacttgccttgttttactccaggattcccctggcctggggagtcccctggaggggcagccccagccccaggaagccagccagtggtttctgtccaatggcctctgaagacttcagagccacagaaacaggcatggcctgggcagagctgttcagagtcattatctggccatgggatgaggacagtcctcaacctagaccctcagcctcagactgctctggtcttaaagagcagcaaggggctggggggtggggtaccctcctctgccctctgtgtggcatcatgcaggccctctggatccatgtcgatgagcctcagctccctg

SEQ ID NO: 195 - DNA, 176258 bp, Homo sapiens
  source 1..176258: mol_type = genomic DNA
gggggtgatgccgggctgtgcgtgatgccgggctgtgcgtgatgccaggctgtgcgtgatgccggtttgtttgtaggtctttagttttttctttcttttgtgtttaatggggaagcttcccgccaagacagcaacccctctgggggaaggagttcaagctgagacctctttttttttttttttgagacggagtctcgctctgtcgcccaggctggggtgcagtggccaatctcggctcactgcaaactccgcctcccgggttcacaccatttccctgcctcagcctcccgagtggctgggactacaggtacctgccaccacgcccagctaattttttgtattttttagtagagacagggtttcaccgtgctagccaagatggtctcgatctcctgaccttgtgatccgcctgcctcggcctcccaaagtgctgagattacaggcgtgagccactgcgcccagccgagacctcctctttcaagttgctacccaggagtggggtgcccagagggacagcccctggaggtgcagccccctgctttgttggggcgggagcatgccaccctctgagccgcggtgggctcagtgaagtgggtgttgtcatccttcccactgcacgggtctagagtctggggtgcggtgagctcgcggcttgctgagggccaacagttagtgaggggtggagctgcgacttgcaggaaggtccagccccgcctcccaggccctttctagccccttctgttgccgtgctgcttcccacccttgcctggaatcctcctgtgggggacgcatgtggtggcccctgtggctgactttccggctgagccagggcaccagtgtcctcactctagagatgagctcttctgaggggtgaggtccagccacacctgtggtggggtggtgtagcccgagcctgttaccccgtctataaaacagagggattcacttcttttacaggcacttcctggccctgcggggtgccctgtctctggctggagctgatgagccgtggtgtgatgcttgcctgggggtcggtgttgcctagaagtgaggaatgacctccttcacccctggctccttccggcagcctggccacttccagcatgtggagggggcccgggccctggcagagacggtgtggaaccgccggccgcatgcggggctggagttcggggctgccaatgggctaaggccctgtgttcaacacatgtcgcggaactgtcgtgaaaaaaagactcaggaccacaggtccggggtgctcccaggggtctttcccaccgaggctgggagtgagcagcagcctaggcccagccacacctcccaggctcgggagctgccaggccaggcaaccgtgaagggtagcagggtggggggtggaggggaggacagggagagcaggcctctcgggcctcacccacccttgcaccttccagctctagggcccacacagtaccaagccctgggctcaatgtaccacttatgaaaactcaattcaaattggcttagtgcaacaaggtatttggtggtctcacatgacttgaacatccaggcctggctgtcacgggaaccgcatctcttcccattgcagctacttggcaggtggcgggatgtcccccagccaccgacgtccccctgcctgctccgcaaccccagggcctgcagaaaaggcccacgagactcagactggcagagacttaggcggaccaggaacaggggcgcagtctccgtcccacccaaaccctaaccagagagaacacggcacgttgtgccagacggaggacggatgccagcgagggtccatgtcctcactgccgacaaggctgggaactgggccaagtgaagcagaggcctccacgtcagatgtgagcgccaccggcccaggtgactgcagttcttccctccttccgttcggcttgagccctccagaggatcggaaaggctgaggcctgacctggtgccgctgtcctgggtgggtctgtcctgctggtcggttcctgcccctctcggggaggttggctggcagctggcaggtggaaagcctcctgtgttcacctcagggcagaggtggggacacagggcgggacgggcgagtgtggtgcccctctggggtgggtgctcttgggtccgcctcccgtgccagagtgcgtgtcaacagttccagctgcccctcagaactgtcctggtttaggaggtgaacacacggggcagcctacattctacgtggtttttttaacattataaaagcagcatgtgttattacaggaaatttaacagaagtatataaaaagaaaccagaagtcacccgggagtctgagcactgtgctctctggggcctttcctttcggccttcttccttccagccctttccctgcacactggacagagtggctgagtctctctcgtaagcccacagggttatgatcgctgtgcaggtaaggagactacacgtgtgccccatgtcagaagcacctgtgcctggcctgggcactgcactgggggtgaggcctggggccaggccccacgtgggggcagaacggagctatccatccagccagggacctcatctagggattgggggcagcaaggggctggtaagggccagaggtaattccagggccactctgtgccctaccctcaggtggggcacaagggtgggggcactgcgctgggtagaagccccccgccagcccctggcccaccagtcatctgtcagatacggaggcaggggtgaggggagggtgtgctggggaagtcaatgcatccagcctcgaatcagtgagtccctaggccttgggtaaggcagggctgcagggatggcagtgaggacaaggggctcacctccccccagcagccccacttcacatgtttgtttcttgagttcagtgctcatagacttaaaaaaaaaaaatcttgctaaaagcaaaaaccaaaagaaaagcgggggctacagagcctcattcccagaggggctgctctggccctaacaagcattctaggccagacttccatgggcagattgtgtgggcaagtgttgagttatggaaatcaagcaaacctctccacgcctgtcctccaggccgcaaacacgcccttctcctgagtccgggtaagcagagggccatgcacgggagacagtgggccacgccgggctgggcttcgtgcttctggggcccccgcaactcactcacgcagcagaagtctgcactgtgctgcctgcagcgggggcagaaacccggagccagtgagcctgtctgtgccacctcagctaccctggtgggtgggtggtgggggccatcccaggcccctcagggctgcaggccaggctgggcccatctccgcacgctgctgtgtggcctcacctcccagcgctgtcgaaggctgagctgctgtgctcggaagggcagactcctccatggcttctaactcaagtgacacaaggagtgtctccccactgctgtcctggggctcctggccctagaagggctccccatgatgcagctgtggccatgggcagccttcccccgtcccccggcgtctccacagctctgtgatgtctgctagccccattttatcgattcagaccccgaggcttggaggggacagaagggtccagtctaggtctctctgcgcccagagctaatgctcctgtgagcaggggggacctgccagttcaccacacccaacagaaaccacacagctggcaccaggcacttgggtattgaaccaggaagctttatttacacagtacaagtaacaagcaaattcctgagagactagagcggctggagtgcaagccacagcctgtgcggggaggccaggctgcaggggcgggcagaccctgggccccgggtctacgctttctggtcgccacacttcctgaagcacggcaacacccacaacatccagctcagggaagcccctgcagccccagaaacagcctatgtgctatctgtcgccccagcccccaggacagcttccccacacactgaaaacacaaatcatttgccaaaaagactatgctagaaggtcagactatcctatctaggctacaagatctccacttcggtctgccattaaaaaaaaaaaaaatctttctcttcttttctctttaaagaggcatgacagaggggtttgaccaacagcgtggacatggcaaggtgtggcatcattgccagtgtggggccagagggtgcccgagccccggtgcgcggccagcctgctgcatccctgccggctgacgtctggagtgaccgtcattccagtgaccacccccatagccacagacggcacgtcagtggaaacgggggtgcagcaggcatgacaccaaggcagagcccgcagcagggggcccggggttccacagctagggaagcttgctcagacaggcagcacacccagggcacggccactcacgcccccgcaccaggagacccatttggaagttagttagggtttgttttgttttctttttaatgtggacttcccctttatttaaattttctttcagtgtacaaattcacaaaactggctacaaaaatttggttgaaaagtaaggctttctgagaatgaaaatctgtacgtctggtcagaacaagctccccacgggcccaggtgcacgtctgcccgtgcaaatccggcctccaccgcgagtaaggcaagagggtatggcaacgaaaatggcaaggctgtggccccagcccctgggccccacgggtggacggcagcccctggcagtttggtggctttggaatgagtggggtgcatgtggcactaagccccccccaccgccccggctttcctgcaggcttagcccgcgctttaggaccccatgagcaggcagatggcctggcacggcttgcttctggctctgcccttcctcagtctcccctcagaggcagggtttgtgggcaaggctgtgacaaaagtaaggctcctgccactgcccccagctggggccatcatgctggtgggggtgagctgtctgcctgctgcccatggggacaccaatgtggggggcacctcctaggcgaacctccctcccagaggactgagatcagaagtcctggggccagcagggtggagtgcaggaacaggctgctccgggcagtgtggcagcttggatgatggggtggcaccttatagatagggtctactccctccagtcaaaacacaaacatgaaaccagctaaaggccatttctttctctaagcagaagggatagccaccattttctcccctgactgctgcgtggtgggcacaggacaggcaggcggggtctgaggaggctgggtcatttctccctaagcgccctggggctgggcttgctggtcgatgggaccagcttgcggggaggtggggaggtggctgtgactcagccagctccacagcttgtcccttcctgccaccaggcctgaatggggaggtggcaggcaaggtttgagggcaggtcacccacaccccagtcccacgacatatacctgtcaccatgtgcctcccaccccagccctaagcaaaggtagctgggggctgctgcatgcctcagcctcagctggcaccgtccacctccctcactgcctctgccttccacaggaaggcctgctatagaggctgtgtgccctcggccacaccgggcatgtggtgccaggaccccccacgcccagtggtactccgggggcaagacatggccatgtgctctccacattcacccaacaactgccctggccgcctccacatttgctctaagaagacatggtctccatgacccccaggcagggacaggccaagatgtctctgtctgctcagagccaccagctcttgggttcggctgtccgggatcacaagtagacatgcctccggcaggagctacagcaaccagaggtgagctggttccccggctctgggacctgcccagtgcccggcataccccatgtgtcagccacctgagctagcaacaccatctctcagggctgtggggctgggggctttctgccagctccttaaagctgatttttaagaagtgccacccacatattgggaacttgaaccaccatccttttgatgtagtaaaaaaataagatttaaacaacgtttcccaaaaagcatctttcttgaggagaaagaaggtgagaagcatctggactcaacctgcagaagcgaggcgttcactcgtccatgaagacgagcaaaagcaaagtgactacaaaagtgctttgaacgcgcgtgtcagccaacacaagggagcgcaccagttatttttagccttatgggaaaatgagccacttgctcctaagccagcccaattgctattgtttgcagaagacgccacattcgctaaaagccagattcccatagagcagagcccatgtggtggtgtctgcaaggcagccggagaggagctacaaaccttgagaggagagcaaaccctcagggggctaggctcctcggatgccccagggtgaggagccagggtggggtaggggcagggagcatgaatccagctttgtgccggtggctgggcctacaacagagatgcagccctcaggactgggctccccctaagctgacaagggcgtgggcttgtcttgaggtgggtgatgtgccctggttacagccagcagtcctcaaggacaaacgggaggtgcctggaatcctgcaggggcccctgcagagtggccagcggacgcccttcacccctgagtgcgcatagggccctcatctgcccacctgctcgcagctcccgtctcccgaggccgttttcaagaggctgccctggtatcgtgccatccctacactcaccggaaccaaccatgcttatcactcagtgacctgtcagccacagagaagggctgccatctgctaaccctgccccaacggtggcagagccatggggtcagcctctccatgctgtaggagaggcaagcaagtccgtcttttcagccaacagatccaccaaatttctacccaacacgggaggccctaacaagcaccctccaaatcgttccttgggcccgagactccggacatggcttaccctctggagggccagtccagcaccccagggattctgtctctcacattggaattaaggccaaatggttctggtgttacagaaggaagcatctcccgaaccttcccaagcctgaagcagggagacctgggagagaaggcacggagtaaaactgagtgaaagaagctgcggggccgactccccagaagtgaacctgagtgaggccaagaagggccctgacatagcagatggcccctggcccccaccccaggccctccctgacagcccccaccaccagggggatacagagcggtgcccagctctgccggggacaacagagactgcccaacatcccacagggaaagaggcagaaaagacgcaaacttcaaagctgtcctctgggctgcagtagttctgtggacctggtggctgccacgctcggggagccggtgagaggctgacacacccgctgtatgacgcggccaggccaggctctcccccaggcagcaggtgggctccctctctgggacccgacaccactcaggaagctttcatcaggcccacgagttgggctccccttcaagggcccacctagtgcccagagtgggggctgtcgatgccagcacaccccagccctgcctgggcccacaccccctcagttcttctctatctgctcaatgtccaactcgccgtccagggagcagaggctgttcccaggggccccgcggtcccgccaggctgcagccggctccgctctcctgccacaatcctcgtccagggcgcagctgtctgactcctcacaggacaggtcctcctggcaggcgaggtggtcgtcgaaggaagggggaagaggctcagggaccggggtcccagcgggggtcctgccccctgggccggaggctgagagcagggcggtccaggccctggtgttgctgacgtggcgggcgaaggggctctggggaccgcagtcctctgtccctgcgctcaggcagctgaggctgctgaaggtctgacagttctgtggaggggcagacacacaggttactaagggttactcccctcccgcagccccaggactgcacaccccacaaagcaactagaccaccaggctgtggcaagaccaatcaagtcccgggttcctcctatccaggcaaggacgggcccatgagcaacgtactcatgaagatgcacctccggccaatgagcgctctgtgctcataaagacacgcgcaattccactattcacctactaactcggcaaagcacacaaatttgatgcagacccagttctggggggctgcggtgaaacaggaatgctcctaacacttcgtccacagcctttctgaagcgcaacctggggaaaatatatccaattccttgatcaggtaatttcactacttggatttttatcttaagaaaacattctaagatgtgtgtaaaaatttggcaacataccgttaaatggaaaagaagagagtaacccaaacaccctacaatggtggtgaaatcaatgtttttcaagcagggacctctatgcaaacataactgacgcgccgcgatacttcccttgagaagggatctgacttggaggaagcccaggctgtaactgccccacacagggcgacacgacgcccgctctacccactctccacaaccagagcgggagccgcaggctagaaggggccgagctgaagtcctgagcctggtgtgtaacagagccatgcagggagctggggaaacatgagttctcggcctcacctggagacacagagtctctagaagggagtggtcctgtgccctccacaggtgctggggactgggaggtctgatctgctgaggaggggccaggctccaggttctggtgctcgccagctgggggcctcatctggaagaggtgcatgatgctccctgcctgccttgctgggccctttgaggccccagagagagagtaggctgcgcagaagcttctccgctcaccaagtgtgctccctctgtgtgctcccaggcaccaagtgtgctcccaggctggcctggggcaggaggcagcctggggcctgcccgagcggcaggcagagcttgaacaggatttcaagggtacgcaggccagttctgcttggcgtcagctgccagcgatgggggtagggctgacactgtgcacaagtgggtgcagttcaacacctgctcccagggcagagcacaaaatccagccttctcctcagaatgatgcacatgccacagacaggacagaggctgagacagtgaggggcactcccggcgcagtcctggatatccccaaccggactgcagcaacgaggtcgaatagcagaggggagcgagggaagagctgcgcacagagggcaggggggaattccagcctttagtttcttcccagcagatgggtggggactggggaagcaaagcagggccttggagcacccgccgcctccctcgccgcacgcctgctgacgccaagaccacagacctgtcccgagggcctgattctttcaaaggctgcagtgtttgtgtgtctctttgaaatacaggtgatcactggctgtcacagccaacaagctgttgaaccagcctcagcggatgggaaataaaaggcgctctctctggaggaaggtatatgtgcctgccatgggcacgctcattgttcctgaacactcggtggaggaagccgttctgatgggtttgctttttttggaatcttttgattaactgagaaaggtgaaggctgaggtgttggggggagctctgcacgggaactcaggagagtggcaggggcacccattagactggagatgctggccccccaaggagccacaggtccaccctctgggccatggtgggattcgatgcagcccggtggtgtgcacacagcacaatcccctcaccacggcagagagctggagacggcgacccctgcacaacagccccaggttcctcaccggctcctggccaggcctggacgatggatcggcaaccaggatcctcgcctgcccctggccaggcctgggcgatggaccagcagctcccaaagcgaacctgccgcttgtgaggtggaagccccagtgctttcgaggggagggtctctgaggctcctcctgcttctcagccaccctcttgactggcctagacctgagccaggacagaaggagaactgagtagggggcacaaaacaggggcaagatggcccagcctgggtggcctcagccgtgtgtcccgggctctgctgagccaggctgccccgacagaggaggcctagggtgaggccaggatgcgtcagggcctgaggtccccggggagcctgacccaccttctcctgaccctggctgagcagcctgtttcttggcctgtagagcagccacggtgtgtaaggataaataatcatgtccagtcaaggccagagcagcccggatgacatgctgtgaacaggttctaggtgggtgacagggcactgaggccgactgccttgggtgtcagccacatctgttgagatgcgtgtgcctgacgcccgaacgcgtgccagcgttttctgcgagctgtcatgtgaggggcctggggcgtggcctgctgcgagtgttttctgtggcctcgcacgtgaacgcagcaggagcgcagcctgcgcaatcggacagacgccgcacagcgcttgtctgtgctcaccctctcggtcctgctcggagcttcccactgacctcctctggcataaggcgcaggtagcgggggtgcctaacttatggccaccatgattgtgtgggtctcggcactaaccgtggtgctacggtcgaaatttgtgccccccccccccccaccattcctcagtgcaaaaggtggggcctctgggaggtgatgaggtcatgtaggggccttcacagatgggatgagggcccataacagagactggagggagcgcaggtgcctctccagccagacaaggatgtgagaaagtgccaactatgaagagcaggccctcacaagaccccgatcctgttggcacctggatcttggacttcccagcttctaactaagaaatacatttctgcggtttatacgttccccagtctaaggcatctttgtcacagcagcccaaacaaagtaagacactttatgcattagccatagccaggcacgggcactggagacccattagctagacctttcacagacgtgtggcttttgcctcactgcgccctggaaggggctgaggtcagacaggcaatacagaggcagactccatccacatgggcatcacggcgccaggcaactcttccacctctgggctgcagccagcctgcctgccgagtcagggtgttcagggctatctggactaattgggccctttctgctgtgaagcagggggagtctacaaggaagggctggtgaatctcgtcacaagcaaaccccagaatgccactgagtctccagtattcttcaaatatacctgcttcctggccacaaagccagcgaaaccttgagaattccgttgactcaaaacagccatttcagccacagtaaaagaaagccaagaaccacccactgtttgccccagctggtggcgagccccacctgtcaggaaggaatgtgactgccacaatggggcggtgtgtgttctgcccagagccccatccctcgtgagcaacccccatgcagacacccagggtgtgccacacccaggccctgcagctgccctgtgccctccatgccccggggcaaggtcccgccccagagtctcctagcagctctagctaccccatggaagaacactgcacaggcaagttggaagcctggaggcctgtgtgccctcaaaaatgtctgcaaaaagccgcaaaatggctaagttcaaagtgctgcatgaacacattattccaaggtgaaagtgctgctccaggaccaactgtcccccagcccgtcgacttctgctctcttgacatccagccccagccctgggctgggccacctactctggaacaggcctgcccaggtaaaaagctcagtgggaactgtccctatggcctcaggctagtggccagggacatggatcaagacctactcctagagtctgcaaaaggcagaccacagcagcctgctagagaggcaactttgggatggaggccctgccttttccatcagaccccctagacctcagctctagccaccaaagaggccctggccattcccgctggccccagctggggtttcctgctcagcctgccccagccggcctccctagggcttcccagcttggagcaatgacccctcttctgcagggctgttctgtgcagatatttattcccatactttctcctgagtccacggggatacagacaaaggtggcctggtccttgccttctaggtacaagctgaaatacagacctgcctcaggaaactcatcaactcaacatatcagctctgtactgctgccaggcagactgctactcactccgtccagcctcagcccaacaagctcattccctctcccaggtgctgctgttcctgggccagcagggtgaacacgtaatagagacgctagaaacatctcctgagctgaactaaaccacatgttttatcagtagtgacccagaacccactctgggctccgaagggcaaggcctggggagtggagggggaaacagccccagcatttgtctagggactgctgtccctagaactcatgagctacggccccacatgcaggagtgggcatccggtgacaaagacaaagctggctggtcaggtgatatgtctgggagcagatagtgaccactcccctttgtcccggttgcctcctccgaaggaggctgcggtattctcaccccctgggccctggctctccactgaacctggagggttccggagaggagagtgggaaactagactctgcagctggaggcactgagatcctccactggccaagtggcctcacttcccgtttcctcccctgggaagcagaactgctgtctctggccaggctgcttcacagggccactgcaaggatcctaagaggaaagccaggctgctggtgtcccacctggagtcccaaacccacagcagtgcccactctccactgctgtgagtgttggctctgacagttcatggctgccccttccggaactactctgggctgggagatctaggataggaaggaggttaccctttccctttggggtcacccccagccaatgaccaacaggtgcagggacaggagctgtccctcctcttgggcgggatcaagtcccacgtgctagtcacacttcgcagctcccaaagcaccaggctgagaagcgacttcagctgagcccacctctttcctgggcctctgcagttcatgggcttccctcgcctccctgaaggttcttgctgggagcatccctctctgtgtcactggcacgagaatccccggctcaggccccgcttctagagacccaatctaaagccacaggtaaaagcaccctgggtgttaatgtagttataggttatgcacctgcttcttagtactactattctttctagaacgggaatgtcaagccatggtcagagactggccacggggccctgtggggagtccagttcctggccccagcctgcctggcatgtgctggggaggggtggttgttggggacgcctctcctcggttagtcggtgtcttaagtgtagtgcccacatgaggcttcctctgggcccctgcctgcgccaagtccgtctcccagaggtgctcaagtgcctcccttttgggcaagcgaagaccacttccctcctgtgccactgctcctcatggcgggaccagctgcgtttcctccttcccttgctctctccctctttttagtccagttttatggcgctctgtgttagaggtcttcatggagctacctcgagtccctctgagaaagggccatcaacaagcccaactcacaagtcacgagcagagctggtccccagcctggcctggcagctgccctgctgaaagctgcaggggccccaggctctggctgagtggacgcatttcctccccaaacagacgcttgcatgagaacagaattctccaagtatcaagaaaacaccaggctatgagaatggatggccaacagcctggaaattttctaagtcccatttgtgctggaagctggcacagaaacaaccaagacggcaaggcatgtggtttcctaggctttttaaaaaactatttcagaaaagaaaaaaaggcacaagcatatttttggcccatctttaacccatctctggtaaatctggattttgcgtgaaggccgtactctttctcacaggaagctgctgcccctgcccctggggccagaggggtcaggtggtggtggcttcttttcctctgaggctgcaggtgctagagatgcctcgaaggctgtgggcatggccaacctttccctaggggctgactgcccaggctctgcagggcccttcccctgggcatctggtcttctgctgctgcccagccacctcctgtgtaggccaggtcagctgctcgcccagggccgtgttggtgcccagtcttaaaaagggatagcatcagccaagcggggtggctcacacctgtcatcccacaactttgggaggccaaggcaggtggattgcttgagcccaggagtttgagatcagcctgggcaacatggcaaaaccccatttctaccaaaaaaactaaaaattagcctgacatagtggcgcatgcctgtggtccccgctactcgggaggctgaggtgggaggatcactgaagcccaggtggcagaggtcgcagtgagccgagattgcaccactgtactccagcctgggcaacagggcaagacctgtctctccaaaaaaagaaaagcgggggacagcatcatgcccagcccatttttgtgaaatgcttaccacctttggaccccaaagaggcagcccttctgagtctggactgcctccttaccctcaggaatcagggcaacactggcagcaaaacccagatggggaagccaggttgccagggcctgaaaatagggaaatcaggttgccaggagcgggaaggtactccagggccctggaagctccactgatttggcaatggatactcaagactcttcccagaccacaggttctagaagcaaatggcccagtgggggtggtaaatatcttcagggtggaaggctggccctggtcagttactaggaaagttcccaccttcctgtgacagtttccttagctcatttctgcagaggccaacaaatgtgtactgagcgcctgccacatgccagccagactgtggtcaccccgttccagaagccagtacagcaggggacagactttggcggcactgtctcagactggtcagactcacagggcaggcgccatttttccttttctgtggacaaggtatcttgccccaaatctgacatcccctccagatctgggaggcccaggtggtgccagagccaggtatgctgtgtggcggccagtccaggccacgctgagtcacttcgggaagggtggcaccagcttggggctctctccatggtctccacacccccagccatcccttggccttgctgtccccgctctggtggctctcttggggccctcatgctgtgcatcctgggggcacccctcccgctggattctttacacagtgtagccttgcctacggtaactcgaggcctaggacccagctggggacaaggactctaaggaaaattacctatggcctccggaggctgaaggagtgggggaaggaggagttgatcttggggacagcccatccccagcccagacacctaaaatcccaggcctctgaagacggacctagggccagcaggcccagcctactatctcccctgccagacccaaggaaggcaagcgtgggctccagcaggtgccctgtggactccactcatcccgtgggctatcagcaacagagggttactcataacggagccctagaaagtcactccgttggcctggggagttgtcaagttcaccagagtggtgctcatcgggccaaacccgccacgcaggccagagcccggccaccactctcgggctggcctttcccaaggcccctcttcctcaggctctgcttcctgggccctccgcccttgctgctcccactcaggctctgactccttctatagcaaacctctttcagccacataaaccccctctgcaccagccctgggtcagcaccatcctgacggccccgccctgtctccctcttcactggcagattccttctctcccaccaaaacccgcctctgcagcagccactccggaagcaggcccaagctcctgtgtgtaccccatttcctgccaagcgtgcagggaaccctgaccccacatgccacggcctggttcacagtgggtgcatcgtgcagcctgggggcagagggtaggtaggaaggaagggcccacccggtcggccctcccaactgggcctctgtttgcacagccctggggtcctgaggcctacaccccaggatgccgtgggtaagaacagaccttggaggcccagagccacgcgtgtcctctgaatggtggccaacccaggggcccctctccgagggcaccccacaggccacacggtggcgacgtttctgcaccaggccccagatggcagatggcctgcccgaacacagaaggtgtgggagctgacgccaaagggcctcccggtgctctcacaattggaaaacaaacattttgtttctgtggtgtacattccagccagcacacactcaggacaggactcgtgaaaccacctcgctcgcagcttggcgtgaagagaattctttgcctaacaaaagtcaagggacctttccaaagcacacagggttctggcggggggccgaggctaatgtactgcctgcgcccacagaccttgaatagagtcgaccagcagggctcacagttttgggggtggcttctgagcaggactagcgatgcagaaggtatgtccaaggctctcagaggggctggtgggcactcgttcgcattcagctgcctggggccacatcggggtgctgaagacaggactgctgagcacggcctctgggctccaccccagcagctcacaactctgttccagatattgtcttccatggagggcacactcttggagaagtgagcaaatcaccaactggtttagccactcttgcagatgagcagacagaggccgagtgaggagaagggacatgccccagactgcacagctgcgtgatgtgcaatcgcaccccatcactctgggctgtgctcaggaaagcatgcagtcctccggcaggacggtggggtagtatgggctggacaggcctgggctggaatcccagctcgggtgtgccctgagggaacttggcaaatcattaaacttctgtgcctcagtttctcatgtgtacaaggctaataagagcctcaaagcctcagaagtgtttggagggataaatagagaccaccaagggtgcgatccccccttcccacactccaccccacaactgtgcctctgtctctctgtggacacagcaaggccacagcaaaggggtctgggagctctgcttatatccaaccactcttgctaacaacaatctgctttcaagagcaagaagacacgccagcaacacaaaagataaaatacccaggaatgaacttataagaactgggaaaattgatagaaaaaaaaaaaaaaaactttaaagaacagaaaagcaagactgaacaaatagaaataaatcctgtgtgagggataggaagactcaacctcaaaaaggtgtaaattctccctaaattaattcagaagtctaatatgatcccaatctaaaatatcaacagtactcccaatccccatggtcttaagacagactaattttcaagtttttaatgaaaaaataaacaagtgagattagtcaggaaaactctgtaaagaacagtggggaagctaaccctcctagactagcccgtaccatataatatgccaaaacacattactaagcctccataactaaaacagcatattagtatgaacgtacatgcatacctacagagaccaatgaaacagaatgttctgaaatagacccagtttggtatatgataagggtagaatctcaaagcagaggagaaaagatggcattctcaacagatggtactgaaacagacaggcagctacattaaagaaaatgctggctccatactcacaccacatacaagataaactcaacacagaccaaagagtgtaatataacccatcaaagtactagaagaaaacaggagacttcctttatcatctcgtgagaaaaaaaggcctttctaaaactcaaaatccagagccataaaagaaataagtaataaatttgataaaaacatttacatgtcaaaaaatgccaaaagcactggtaggaatgtaagatggtacagtcgttgcggagaacagtttggcagcttctcaaaatgttcaacacagagttaccatcagacccagcaattccatgtctaagaaatgaaaacatatgtctatgtagaaacttgtacacaaacatttacaacagtgttattcaaaatatccaaaaagtagaaacagcccaaatgtctatcaactggtgaatggacacataaaatgtggtctagctgtacaacagaatattatttggccataaaaagaaaggagatactgatacatgctacggtgtggatgacccttgaaagcatgacgctaagtgaaggaagccagacgcaaaaggccacatatttcatggatccattgatatgaaatgtccagaatagggaaacccactgatacggtttggctgtgtccccacccaaatctcatcttgaattgtagttcccataatccccacgtttcgtgggagggacgcagtggaaggtaactgaatcatgggggcagttaccttcatgctactcttgtgatagttagttctcacgagagctgatggttttataaggggctttgttcagcacttctctcacctgccgccatgtgaagaaggatgtgtttgcttccccttccgccatgactgtaagtttccagaggcctccccggccatgtggaactgtgagtcaattaagactctttcctttaaaattacccagtctcaagtatttccttatggcaacgtgaggacgcactaatacacccatggagacagaacacagttttgtggttgccagtggctgggagtggtggtggctgaaggggacggggagtgactgctaaggggtatggactttcttttgaggtgataaaaatgttctaaaattgattgtggtgatggctgtagaactctgtgaatatattcaagaccactaagttgtacaccttaaatgggtgaactgtgtggtatatgaattatatctcaataaagctcaagaatgtcaaaagcaaagtcagaaaacaaagaacaaattagtaataaatatttgtaactcatatcacaggcaaaaattaatctccctaatatacaattgagaagaaaacgaccaatgacacaattattttattttttatttttatttttgtttttggagacagagtcttgctctgtcacccaggctggagtgcagtggcatgatctcggctcactgcaacctctgcctcctgggttcaagcaattctcctgcctcagcctcctgagtaggtgggaaaacagggcccgccaccacacctggctaactttttgtatttttagcagagacagggttttactacattggccaggctggtctcgaactcctgaccttgtgatctgcctcggcctcccaaagtgctgggattacaggtgtgagccaccacgctcggccgacacaattattttaaaagggcaaatgaaaagaacacagaaaaggacataaaaatagcctttaaatatacaaaagatgttcaactgattagaaaaacgcaaactaaaatgacagagaaaccgtttacctatctggttgtgaaaatgtcaactgctggaccagcctctactgagaggtggggtgggaaacaaaccaccctgaacgtggccctctgagatgcagggaggaagggctcctacagcgttaacctggcgacatcctccaagaggccaaaggcacacgacgtgtgaccaagcaatcccaatgggaacggaccctgcagaagacggatctcccatgcccaaagggactcatgcacgtgaaattcacagctgaagcagcccggaggagtcggcaggggaccccacaaagtgggtacatctgtgcagtggaacaccgtgcagccaaaaaaaagggcatgagaacacctccagggtttactattcaagagaacaagatacagcaaggtatgtattgcatgctattatctcctctgttataataagaattgaaattcctatttgcttatattgtaaaaaggagcacaagaaactagcggtccatctgagggcatgggagatgggagagatggggcaagagtttactctgtatgttgttttaattttcgaacacgtgaatgtactgtccgaaaatgaaatgccatgtctatctctgtgtgtgtgtatttatcttaagagcagagcacacactaagttagaaaaggccaaaatcctattcacatgatcgcttgtgttttccaaggtcgaattcccaccccatctccatattaaaatctctcgatgtttctctaccaaagttcttttctttccttttctctttattggtagcaacaaagcgtatgaatttttttttttaacggcactttgcaaaatctgtggacaaaaaacctctaccagccccaggttcctgcactttaataatcaccaaattaaatctgagtttcacacaagggggacatgcaaacatcaggaggggccgacccctgaacggccagtgagccaccctgtgccagacgcctgcatgtgggtggttagccgggtggcttttcacatggctggtaggtgctttcacagaacaacaggaagagggagatcccaggaaaacactgttttgctgtacagaggttcaggtggccccctgcccgcccaccctgggattgctttgcacctgcagccttagctgcacctgtcttgtccacagaggcccacgttggccactgggggcagctgccaggccgggccccatcctgcggaggttagaggaggctgcctgtttgtcaccaatggttctgggtggggaatggcctctcatgtctgtgagcagcctcggtggccgcaggacacacagaacacggacacctgggccaggtgtctgcagttctgatgtctgtgacgccagagccccgctcccactggccgtgttttcacacccaccaagcagaagagatgcagaggcggagttcccagagtcaggtgcagctagacttcctctcgatctggggggagcgagacttctttcctcccaacatcaaaacagaagtcataaggagaaggcaggcaagcgctgcagaaacacaactgatttatctgcccaaagaggcctcagcacagaaaactccaggagcaagcagtcaccacaaccctccagaggctgccctttctgacaaaatgctccctgctcccactcgagagggcccccttggaaatggggtctagatgcacctctggggacctccatctctcctccattctgagcaggggctgggtcacccttgctggtgctgggcctcacagggtccgcaggtggcaggagacaaccagacatgccatgaggcagcgcaggtccaggacgtacctggcaggacgtgggtgcctggctttggctccagccgccttgtgctgggcatgccctggggaagtcttgcttgctctgggcccatctgcacaatgagggtcttcggcttgagccccgggtgtccctgccctaccctgcaaagccactgcaccgagactagcttcgatgcaacttgcgaccgggcaccaaatccaactcagacctgtactgctgaccaccctaatggccaccataggccagatcccatcttgagctccagacccaatgggcatgtccctgctgatgtcccacgctcctctcagctcaatgtgtctcaaacctgatccagcaccttcctccccaagctctcagaataaaaagcaaacacctcactccagggctaaaggcccggtatctccaggccaatctcactcataccctccctgcctactcaggctcccctggacacatggagcccctcccatggagtgccctccataggccaggatcgcccgcttcctaaacctctctctcccgaaagactcttcctgccattgcatagcccagctgaaatgaaacagccaccccagccctatcaaagcctccatggagcctctctgtgcaggcagagggaatttcgctctccattctggagccccccgcacccaggagctggtgggccctccctgtctgagtgcctctgtgggctgcaaccctgatgcctggaaaaacagggtcaggtggctgaatgaaggactgaaatgatgatccatttggggtgggatcctgcctgtcaacactaggaccgggcctggcgccatggctcacacctgtaatcccaggactttgggaagctgaggcaggcggatcacgaggtcaggagattgagaccatcctggctaacacagtgaaaccccgtctctacaaaaaacacaaaaaaattagcagggtgtggtggcgggcgcctgtagtcccagctactcgggaggctgaggcaggaaaatggcatgaacctgggaggcggagcttgcagtgagccaagattgcaccactgcactccagcactccagcctgggtgacagagactccacctcaaaaacaaaacaaaacaaaacaaaacactgggaccggtgcttccttgggcatgttacgcaatctgagtttctcttttcccatctgtaaaatggggaaataaaactgccctagaggggctgcatggagttgaaatgagatcacaagcagctcggggctcagaggggtttgaacagcacctgatggtgccagctgcaccacgacagagggagtgacccacgttgcccacgagcagccccaggcagacacagcacaaggaggaccactgaccacctcaccccacccacaaacagtccatgaaagcagagaccccaggcatgctggggcgggggaggccatgctggccctcgctggctactggagcccttcaggggcgaggacaaggtggcagaccagcaaggcttggccagcacatcccagcacgtccagcagggcagctggccatggacatgcccgctggtggtgggtgtggaaggacattcctgggcacattctgctcctctgggctcagctggccccacctgcagcgccagaagtgagtggtggggacaaagtatatgtagggccctggtgttccctgagccccacaggacctgctggagactgcatttgctaaggcttttctcacctggaggcaaaccaaatactggcttagctattgggtggagatgtggggagactcaccccagacttacccaccagggacccttcctggggtggctcagcctcttgcccatataagtcccgtctctctaacccaatgtgacacctgacagggagcccctagttcagggcttctggaccacagggattcagaggtgggccatggggggttgggttctgtattttctaccaggaccgggccagacccaccccagcaggaggtcaggattctgtgccaggttcaggcactcaggaaatgtttccttaaagagtactggaggtgccaggagatccccaagagggctgaggacagggcccatcctcagcagtgggcatgcagcccggggcatgctgtttgccaccaaacagacacagaaatagaaaatctgctctgtctagctgagtggccttgggcgggtcatggtgggcatcacgaggcagacctctcgaggcagctgtgcaggctggatcagaaggggtcctgggaagacccagctcaaggcccagggtgcttggcaggtggggctcccactcagaggcccaactcaggctccagaagggttggccggggtgggtctctgttcttttgactttcccagggacacacctcaacataactatgaattttctgataggcttttccccccctttctatattttccccttttgttcattactgtttaaatgcttggcagaatatacaaacacagcgcccgcatcccagagtgcctagctgcgtctgagtgaaagtgctggagacagatgcctggggcgggcatggggggacctctcacctccatcagctcatcatccaggcacaagggacaggctctgccagcctccttttacacctggagagacagaggttggtttgggcaaactcccaccgagaggcagtggcagggccaggttcaaatccagatctgtctgttcaaagcctgcacccacccttaaccaccacgctgcacctcactgctaccataaaataccagaattcaggatggcagaaaatcactttctacccctaggaacccccagcaagccttgcctgctgcttggtaaaaattcccaactacaaggctgaaagcccttgggcagagccaccacaccaactggagcagcaaagaaggcaattcagggagccctgacggctgcaccttgctacaggtgcattctcaggtgcaccccgtgggcttgtctgcgagtgtgaggagcagcacagcctcaggccctccacacctctccggccagcaccctcagcctgcacagctctgcgcggcaggttggggagggatcgtgttcctgagcagccaagccttggcccagaaaagggcaggcagtggctgggataacaaggggagtagggggcacaccaagatggcccctgaagaatgtgcagggcttggagccaccctaaatcattcttaaatccatgtgtttcttcctgtgcagaaaaccaacccaaaggtggagatgccatgaatcccaccagtccgtcatcccctagaatcttgtcttgtcctgggaacaaaggcagggcatttctggaggttcgttctggtgtcctagcagctgcagagcctcgaatgatggcagagctaatgtttactaagaatttaccctgagctccatgggatcgccccactaaaccctcacctcaaccttgggagggggcgctactgtcatcagaggtttggtgaggccacacagggagtgagtggggaggatctaggtgccagcagtctgaatccgggatcaggcgctgaccaccatgcaatacagccccgagcgcaggaagagaggaggaggaaaaagacagcccccgctgcggcagagcagagtgaggcaacagcccggcaaaggccgcagagggcacgccccgctgaccccacactaggaagagccctcagccagatgggaggaagggacaaaggctgtgggtattttactttcctctggagcataccccgcctaggtgacaaatgatgtgtgtgggagaggctgaaagcacccagaagacaaaaccagtaagacaaaacaggaagaaaccagcacagtgcccagagcagacaccctcaggggctgtccagagtcccgggcagcctccaacggaccccgactggctctcatccagttccttcccttaaaggtaaatgctcacacgtcacacacatacctcttcctcgatatgttggattcacttcaacatgttgcagtttctacagtgaccaataatgctggggccagtttaactctgagcccccagtaacccttccagtgcagatgggaagtgtgagctgtggtggaatagtgagaacactaccccaagaccagcttcaggacagggccccagcctctggctgagaccatcactggctcagcccaagttaggagatgagccaactctgtcctggcaccaacatctggtgcttcagagaaagcacagaacccactggggaggtgcctctccttctatcagcaagtggctaccacaaaaaggaactgccagacaaccatgtgtcatcactgaggcccatgttcactagaaaacaggagccgagagtcacggggaactcagagataagattctaaaatcctcgagggagcaaccaccatggccttaggggaaaagcaccacccacccccaacacactggatccactgtgcctgcaagaggccccttccttgggagccagagaggagaggagccccttcttgaccctcggtcccaggtgtcaacaggtgggtcttattaagacggcaagcactgataagacttacaggtcccatgaactagatcctaactatgtgctgggcactgcgaaaggaacttggcacaccgcgactcgctggttcctccagaacccccaggaggcctgtgccagtgatactattttatagttgaggaaacagaggcctagagaggctgaggaacctgctaaggtcacccagctggagagccggaagcctaaagcaggtacacaactgaacaaatggcgtgcgtgcatacacgtgtgcatacatgcccaccctgagaacgtgagtgttcctcgaggaagaataagccatcggagccctaactgacagtcaccacaagtgcagtcagtggctgtgccgggcaggctcagaccacagggcggccacttctgtctctcaccctcaagaacagtagccctccctgctgagaggctttacgggcaagctgccatgccagcaggtcctagagatcttaacaaaggcacgggctccagggaaggagaggacagccagagcgccatgcgtgtgaacacgtccacagtgacgggtctcactctcacaccaacgcctctccggtggttgtgacaaaagcaagccagtttcaagggtggggcagtgaaggcagtgactctaccaaaacagaagggcagcccggcatagcccagatgtcaccttctcaagcctgatgactcccatctgcagaagctgcccggtggcccaacaggcagatgggtgctcaggctggcttgcaggtgtcccgctctgccacagcagccagaatggttgccatccttcggcagcaatgtccctgagtgaacacggaacctgaaatccccgtgagtcaggatccccgagacacaggggcacgtgcaactgccgatcacagaagctttcagacagtgactccaggcagaaagggtggccttctcttcttatgcagtggaattggttctcattgtaaaattaaataggagccaagaattgtccccataactgttcctgcagggtggaggtcggtctaggagaaacctcttgaagctgcagcacacggctctctggcagtccggcaagactgcctttctcctttccgcattacatgcactcctctccttccttctttcatctctaccactgtctcctctaagtaagaccccacagtgttttcatgaaagcaagaaaaacggacattcctgacggtatcgtgggacctgtcgaggcagaatcgctcacatatgccttttttctcactgttagcttgagatgatcttaaagaaagaaaagaaagagcacgaaaaggacacacaaaacacaaacaaaaatgtctcttcctagatggccgacaggaaataaagctgtctgtctctggagagaaacgtcaattgttggaacgctcaggttaagggagaatcacagaatcaaggatcacactcacccagctgaaagcaagaaagcaacttccaattgattgaggggaaaaaaattaattgcagctttagaaaaatctcttctgtgaggctgggctgtggggccattgaagcccaggcggctcggcagggccctcagcagttctccctattcacgacgcgcaggtggctgataaatttcccagggtttctcggcgcggtgattgcgcctggctctttcagcgtggctgcaggaatctatacaggtccacttaaatcagtctgaagctgtgaaagcctccatcactcgtcgcccgggcccggccgcccaaacagagccccgggagggccagcgggggggtgcagggctgggaggacagtgccaattaaaaatctgagcctgtgggcctttctctctcttgttttcattcctacagctacattgtgtccactggcagcggattccaaaggcgaagaggctgcattcacggcccggagctttagagccgccatcccgaaccaggctaattaaaaacgtgatttcccccacagggctgcccccaggagcagtgaggatggaaggctcagaagatgaggcacagcggtgcacgctgggcggctcctggagcggccagcaggctaggaagacagggccctttctgaccaccgccccatcctcagagagacacagggcatccagaggttggagatgcccatctgtacatggcatctgcccccagaaaaggctggtcccttgggtctctggaacattctagtgtttcctgctcatgccaggggcctccacacctgctcgggaagaaagggcaaaactggccttgctccaacgaagatgtgactcagggtaaattcaccacccggtgcctgctcccagggcacctggtgggccacaagccaccaggccttgagctgcttatagttgggggaagagggtacccaggcctggccactttgcagctatttgtctaccgcctggtcacttggccccaccgagcctgcctcaattggaaaatgctggtaaggagagctagctcaccgagttagctgggctagcacagtcatggcacacagcccttacccagtgacagctaagaccgcaactcatagcactaccagtggctacagccccttcacgtcctctgccagcaaacctaggagctttggctctgcaaaggccaattagaacccccagagacagggctggggctgctcactgcccgccctccttccttccttccctttagaattccaggacagctcctagcctagaaatgaagatgtgggtggcaactctgttctttcagtgaaatgcacatcacttctggctgacctgcctggcactcagcaacccttctccaaattaccagggtttcctcctggcaggaacagctcagaaatgtaccactcaaagggttttgccactgagggaggcctgagaggtgaccttcctggggtgctcagagaagcttgggatgtcagtttcccacatggctgtgggtagggaacccgagagtgcagatgggtcctgggggtggcagcagggatgggcatgggggagggaggcagaagagggccatttgggctggcttttccagccagagcctgctctgacaggtaggctgggagatggaaggggacggcgcatcagtccctctgctgcaggactcggtgctgcaagaacatctgtccctaagtaggtgatggtggcccctccacatccagagttctgaggggcctgcctcttgctctccccctgaatgccagggggaggagccacatgactgtcacctgcagggctgaagccaggccacaaggcaagggcgccaagcagaggtcaccttggggaccgcagcaaagtcatgaccaggtttagcctcaagcaagggcccagggtacctgtggccacaaggagctggctggagccctcggcataggatggggtagccggggcaactcgggccctccctggaggcctcaggtgcagagtgggccctgccatcaccgccattctgtggtaagaccgcctatctgctctctcagcctcttcctcaacacagtaactgggaaaatcccttcttctctttaattttttaaaattgaaaatggagaacagtaatcattgagagcaataataacaataacactaattcagagtgccccctcaggccctgctgagagatgcaaaatctcagcccctgagacaggctctaggggcccaagatgggcccacgccggcagcattccccaccccacccccattccacccacagccttcccagcctctgctgaaggcagacaggtgagggtaaattgagtagggattttgccaggcagttgctaagatcactccaagaatcctgaaatcctgattaatgggcaagatggctctgtgctttggcagtgggtctcaggcgccttttcttatggaaagcagcgacgcacactgttggcggctgtctggcataacgcctgcttgcctggcctcattcgaggggctcaggagaccccagcatcacccgggagctggcagaagtgcgccaggaaaccatcatgtgaccatccttcccagctcctagggacttggactcagggatagccaggatggaaaacctggggccaataagggtaaacagcctgtcccgggggcagcaggcctctgtgtctacaggtaacaggatgccctgccgcccagctccaccccacactgcatggcatttgagctgagtgggcaccgagaaggtgcgtctcctttgccactgcccaattcagaaggatcagctttcctgtctgaggccaaacaggtaacagggcctcagggactgcagacaccagggaggtcaaggccttttactccagtcagtggttctcgaccacagcaatgttgcccccagctgaggaccacttgtcatgactgcgggagggggaacaatgagcatctagcggatggagtcagggatcctcccatgaaggacagctctccacagacccacaagccccatgtcactccacatcacagcgtctctccctctgattgcctgtgtgagtgcagctcgctttctttaggcatttgctatgtgccttcaagaatgtttccatcgtggcttcaatacagatgggctgtatctgctctggccccgcaatgggctcaaacatcttccccaggcctctaatgcctgacaggagagaggaggagaaacgtgccattctacagccaagcgtgtaaggaatcccagaacaaacggaaccgttttgttaccatctaccacaggccaaggccctcccattgctgtgccggcgccttctgtttcctccctggtctttttgctcccagcccggagcctctggaatacatgagacgaggttcccgataggtgcagggctttacggctccctcagtatccctgccctccagctcagatggccaccctgtgacgctcttttgcccagtctcctcctgctgctgggagacctggcctccagccaacccccttatgtgaactctgacttcccttcttatctaactcatgagcctgcaatactggggtgattcatcccattactttaaggggaggctggaagcagccatgatggatgccagggagtctgggaaaactactggcatctcttgcccactgcagaagcacccaaggcaagcaaacaggcaaatgtgggtgtatgggtgtcgacctctccaggttctaagtgaggccccatccctggaatctcacacagccagcctcctggccgggccattcctgggtagcaagccctcccttggcagaccctgcagcaggcgatgggaactgggagcagaaggagaacagcctccacctcagagaagcccaaactcaatgaagaggcaggactggtgagcggcacacactgggaagggatgcacagcgaggcatcggggccgcatgtgctgatggtcaggctgtgctgggcactctgccaagcacgtggggaaaatatcatctcatttaatgtgtatcactgccctgaagctctcaagtttattactagacccatttcataaatggggactctgagtctaagtgacttggatgaatggcgcagaaagccacggcaaatctccctgtctctgaggagcggccccaaggctccaggcctcgggtgtttctcttgctcataaaccccactccccaagctgcgacaatcagatttttcagggtctcaagcagagtgttgatctgtacattttgaagttccaaaggaactggaagctccctgtagacaggcaggcaagagaagaaaaggaaagctgtcgccaagaccccaccacatgcgggagctttccattagcaggactgtcctcagaacaagtgtgagcagagatgcatgtcaccaatgcactcgtgtggcagctgaggctcagggaggcaggtatgtgtccagtgtcacagctaggaagcagcagagggcagggaaggcctgtaccctttccatgtcaccccatggggtggggtggctatgtctccctcggggtcaccccctcccccagggcacctcactgaagtgttgagggcagacccaagatggctgcttgagatgagccgaggaaaatgtcttcggcttcaccagacacaggaggagcttcatagctcaagggatgaccctggcctgtggtcactgtttcctacaaagcccagaacagccccgtgtgcatgaagcaggtcagtagccacatggagctatcagccagcagagggctcagggtggagccagggatgggaaaggaagtgggtgtgggcacggggagagtcaacaggaaatgcactggggacgccatggggctggctgaggcctcaccacccccagacttctgcattcttggttcttcctaggatgctgaaaatctgcttggccctgcagggcacaatggcacaccctgcctcctccagaaaaccctctctctgagaacactgcagcagccaagcttctgggaggaaaccaagacacatcgaggatccaaggctctgggagcgtctgttggaaaaccccacgctcaagaccacaggcctgggcacggcagagggccaagccttgggcaggaaacctccaggatggagagggacagatgggcagtgggtgcctccagcccagtgtgcctggtgcccacgagcctgcagtctccatggaggggaaggtctgggaagctggggtaggatgggctgcggcctgctgtgtcctggcctggctctccaccacctgccataacatcatcacacatctccccgctccttgggagcctcccccatctgtaaaatggcaataatgacctcgtcctgcctgcctcataggaatgccatgagacctcaagaataattgccatggggcttcacgagggagaacccactagaaatgcaacagcagagccctccaccatgccctcacaatgggccaggcatggtgcgtgcaccaacaagcccctaaaggtgctcttttttgctttgcagatgagcaaacaggctcagaaaggttaagtaacttgcccaaggtcctacagatgaaacagaactcagagctagtccacctgtcccgcctgttcggggctccttttgctgctaaggggtctggccgggattagcaattgtgggaagccgccctgagaagagaaagcaccgtcccagcccttaacgaatgtgcagcgtcactggagagactggtggtggaaagtgcttgccacaacaagcgagccacttgcgggagacaggatgaaactggtgggggatgagagctgtatcctactgacttgcagaagcagctgcaggcctgctgggcagactgccaaaggcaggcaacagcagcagtggaaggccaggtctggtcactgccccatcatcagctaactttctaagtgacccagggcaaaggactgcaactctctaggcctgtttcaccaggtacataatgacaggtcccttccagttctgaaacgtataggctccagctagaaccttctgcacctacctcttcaacctctaacctgggagtaaggaaaccagcctggattatttcgaagtttccatgtcttccaagaaaaaatattgttgtctcagtagatggcagcaaactaaccctggcagaggccttcctgctattgttggaccagcttggcaccctctgaccacccatctgaccaagcagaatggaggatggggtagagagggtgctacagggcaggctggcccaggcaacaaagccatggtgggaaagagaaacagcaggcctggccggccccacctccaggcaagtcagcagctgtttctcccaacatgtctgccctccgtcgcataacacaaggtattgccaaaatcccagccactgcaaggatgtggacaatgcctgttctaaacgagcttccagaccaagcctcagtctgctttctcacagctggataaaggccgccttccatgcagagtgtccccctgtaagatggagggcttactgccagagagctgccctacccagaactcaggctggcggtgtccctggtctccctcacacactgggaagtgtgcacttgattctttgtactccttcagaccccaaaagcaaccaaatatacataagtccccaaaagcaaccaaatatacgtaagtccccataagcaaccaaatatacataagtcccaggaaacgcgccattcattttaagtccatggtgcctttaggaagacactactgttcccattttttagataagaactctgcggcccagggcagtcacttgcccaggccctctcctcgcaggctcactccctctgcactttgcctgcagatttccagccatctactagatatttctagcagtaaaactaacgtcataacaagacaagctggcgacaggtacagatgacataattatcgatcagatgacttatctccctaatggagctgggatattcttagtaatataattaagtataggataattttacaatactgtaggctgtgccctgctcccagagtaagcactaaggaggcagacctctccctccaaggaaggactctctatcggttggaggaggccaaaggtaaaagaggcccaggtcatcgcgggacaggtgtcgtctaccctgaatctgagaaccaggcatgagcctaggtcttctaagcgttccagttggaccctccacgctggatgatgacaatgatggtggttttggcagtggtgcttgtgacgctgaaagtaacggtggttatggtgatgatggtgatgacagcagctgccatctgccaagcacgcacagtgtggccagatgtgctaggcgctctacaccctttggcctatgtgatcttcacaccaaccctgtgaggcaagttattcttctcatctccactttacaaatgaggacgctgcagctcagagtttacctggccagagcacagcgaagccgagagctgaaccctaaccccaggactccagaggcgctgttttcttccacctaatgcctcccagagtgaggcattcctcctccagaaggaaaactacttctgcagatgaccaatttccagactatttccccagtacaatgtccccagccctgctaggaggccaatattcctttgccatcagccatttgtttcgagagagagatgtgtttgaaaagaaagggttcatcctaaagtggattttctgtgccctaaactctgaaacccccctcttgccttcaacgagaatgaaaacaaacctaagacaacaaagaaaaaagaaatgcgaggactcacgggcgctgagtcacaccgagaggctccacgcatgtgaattagccacgccagacactgggagccccccaatctcccttcagaggccacttcctgcccaaaccaccccaaagccaaagccactgcagcaaaggtggcagcaaggcagggccagctgcactcagcacaggggcaaagccaagccttctgtccttgccggcctcggtttctccctttgtgccacagggagacagagccaggtggccaccaccttgccctcagacgctctgttgtggccttgctgctagccttttccaggagctgaggccccagggccctaactcagttccctcgtgttccatttccctctgcaccttcccaaaggtgcagaaggaggctggaggggtgcggctgagcagagggtgctgcctggcatcctcctgagcctgctctgctctgtcctcccagctacacaggacaggcagggatgaagctaagagggctgccaggggaggcagtataaaggcatgctgtggcccctcactgctgaactgcaggcactgtagcagggagcccagccgctggacggaatcacaatcccacacacggcaccagggacctggactatgcaccccactcctcctgctgctctcccctgccacccccacctccgagacagtgaggcccagcggcctcctcatttcctcctcaggggagcactgtggagactgtcagctgacttccgaccctggggcctgcctgctctggagggtcaaggtcagcagagccccacagatgtctagcccctgcctcaggtcggcagtgactgggcactggcacatggcggggacacgccacccctgctgtctactatgactgggcctggaacgttcacgccagccccagcgtcaggacaactgcgactgagggcggttctcaacccagacagcctttgcttgctggttcctttatttgtcccccatctgtgaagcatctgtggtccaccaggtgctctcctgagcaatgtgaactcaggggccaggaagcgaggcccctgccctccaggagtccctttccaaagggcatacctggagaatttcaaagccaacatcaaagtgtgataagcacgagcatgcttttgaggctggaattatcccctctagtttttcatttatagtcctctcttccacttgggtcccaagactttcccaagtttgtccctgccggtgtccagcaatggttatgaaaacccgcagagggaaaagctatcaattcccaactgtttctactcagtaggtgtcaaccataataccagggcttaggactagccagggtcttaccatgtgcacaatacgttcacatccagccgtgcccaggggtgaactgagcaaggaactcatgcccaattcacagatcaggaaactgaggccctgggcaacaccgggatgggctgagttcatgctgttgtcaggtgtcagaggaggctgtggccacagccttagagagaagaaggggcccggcccacagctgcactcacatctggtcccagcctgtcacccacggtgataaccctgggtgaccatggccagccacttccctcctctggcctcagtggcttcacctgcagaggcaaggggtccaaggaggtgagtgacattcagtgtttcctggtgctcacattccagggctatcacaaacaccagtcccacaggtagtgggaaaggacagtatgtattttaatgacacaaggaagccttgtggtggagggcctgaagcagcagcattccccatctgtcctatatggctccagttcggggtccacttccttcaatatggaaggtagcaagagtacccagggaacggccgagcaaaccacagaaaggcaaaaatctactagctggaaccctcaggctagtccccagggcagaggagcctcttgcctctccagcccacacaggcagacgacgccctgtgttggtgtgtgctcgaccaatcaaaggagctgtagacaaaatggccctaccttcccttgtgcacccagatgccttggccaggaggagactgtgctgccaggccctaagaggtaggacccacgtgcccttgaggccaggacagcatttttcaaccaggtcccggagggctctgcagataactaagttaaacagagccttgagggctgcctgcctcacctcatgtgccccaatgacactggtagggccttgctcttcaaaaactattttgataggatttttatccctgctcagtgaatggggagaagcccataggcttggatatgtttctcagatgcagccccaagctcaaggccagccaggaggtaatgtcctccagatttccagaagagctgtgcctgaggctgggacaaccagcttcctttatgccaggagggttggagtaaagcaggggcttgccagaagggctctggcgtggggaccctgatggactcaacaggggcatctcacagagctgaaaatacccaggcactgccagggtcccggatggccaggcctcactctccgtgttacactttcaagaggtcttgcaagaacaagatgggctgcgggcccctgccaggacactggcccagctgacggcactcatctgtagggcaaagaggcccagctgggtctcgctggcacagtggggtcagactcatgagccagacttgggtcaaagccctctcttaaccactatcttctcagggtaaccttggccaggaccctcccagtctcagcctcgctttccttgtccacatggcccacgcagagcctatctcagagggatcctgtgaggaagaaatgaacaggatgcaagaacgcactttgggacctccaaggtgctggacagatgggggagtccatgtgtggccaggtctggaacacctgctgcccagttcagggttgatgccagctggattctccagcttctttatactgaccagtgctgtgcagaaactcagctagaaagccccaggagcccggtcccacctggtaaccttctggaagccgaccaggcagctccaatcagcacccttcctgggctgaagtctgccaggttgctgaggacgcagggaggaggggcattcagagccattaagggatctgctggacaccagccacatgcctccttatttggaaaaactgtggctctgggaactcaggtgctatcctaaagaaagaggctcctatccttgccaaaggaaataattaggaagcattgtgagaaaaatgcatgttgtgaatgaaacgctgcgcccagccatgcgaagtgcgattgtcatcgtcatgcaacgctatggtgctcagaaaaaaatcttcaaacaaaggacctggagcctagggcctggccctcccaacccctgggtctgagcggacttcctctctccacaccaggacagaaactggaccacactggaacatcagctctgggaagggccacttccggtctgtggccatgctggcaaggatgggaaggaagagcgctcccagggaggtggtgtttggcttcccaaaggtctgcagtcatgcggatggcagcagagatggtgagggctgactttccacttacagcagaacaaagaaggagttactggaaggcagaatccgcctctgattcatctccccgtggccctccctgcccagggcgagggtagaaagcccgactccaggcatgtgccagggtccccacccccagctcgggtggtggcagaacccactcccttccactacagaggaagggacatctctgcggacatgagtggtgttgtgggtagggctgtaggtgtttggccttcctgaggcctgggaccttctgctcccccagctctgagtccctgggtttgtgagcaggccccttccagaaggaggtaaggaggccccggcgtgcctctgctcgccctgtctgtgtctggtctaaggagctccatgggggaagtcacaccaggcccctcgggctccttttgaaagcaagacaggcaggaaatgcacaatgattgctttgccaacagccaagactgcagtgagccacaggtcccaaagcgtgcccaggttacaggagccccaggggcacacaggtgatgggcttctggacaatcccgttttagatgatggcaacacagatttgagctccagggcccggggctgcctcctcaggcccagcttaggggcccattcataacttcactccacattggacactcttggctggagagggtggactgaccacagtgtcctgtcacattcaggtgacaaggctagcttcaggacattctcatctcccatctccccacccacaccctgggactacctcctggacaccacccagtctcacacagcaggaggccattcagaggctcagcatttccacatgaattcaggtgtcaggacctgctggcctggggaggggcctgaaagccacaccctcctgggtgtcaacaggaagactaggggctccttgaacttgctacctccttggctttccccaccaagacatctcatcccacgaagcttctcaggacgataccagcaggaaacacgggatgccgaggaatgaggaagagctgcccagcactggggctctggagacagcctctccttggggtgagcgtggccactccaggtaacgcccactgtcatccagggactgcttaatggcagagctggggctcctgactgcagcaggggttcagcaggcacagatgaatatccagcagcctgttctctgctggggtccctctgccccagccacagccagctcctcccacacacgccagccttggaggtctctcattccacgcagaagatccttctacttctctgctcgtcgcctctgtcccactacccatgctccttgtctttgcagcacttactttgtccaacacaatctgctttgctcttaatattgtctatctgtctacactagatggaagctgccagagagaagggcccatggccatcctgctccacacagtcctcagtgccaagagcagtatgtgcacacagcaggtacgtaccaaacagaactagccccagaacgggatccatccagcagcaggcaatggggcattgcttctgtttttcctgctctacagtaccagcacggtacccagcacacagtaggtcccagaaagacacattgaacaggtggcaaagagaaacctgaacatgggtcctttatgagtacaaaggaaatgaggaggaggcctggattctgcccactggaacagggcaaggcccaagatctgggaggcggacatacaaccaagaggcgtctaggtttgctcacttacagcaggcactcccactgtggaggcgcagtctggaggcaccccaggccccacgataagcatgctctgaatgatcaagagagccaaaggctccagggagccctgctgtagtgggagcgcaggtgttccccgacgccatggccctaatggagggctggtttgggtacaatgccacagtgaacacagaccccctgaactcacatatagactatttgttaagaacaaaaccaaactaatagtagggcactgctccatcagcaccgttgctccagtgtccatggcacagaccaatattggaaacgactgttgttcacggacaggctggaaacagttggtcaaattgtgcttggtgcggccaggccagcccagcccctaaggccagacaacacgaccctcccgaagggacaacagggttgatgagatcataggtgatgtgctgccctcccactgatggagtgtgttctgtggtgttaaagaggaaatagcattattacaaactaaggatacaagagcatcaacattcacagtctttgaaactgaacagcctaaaataattcaattctatgttgcacaagccaggagtttttttaaaaactgtgacaacacttggacacaggaaggggaacatcacacaccggggcctgttgtggggtggggggagaggggagggatagcattaggagatatacctaatgtaaatgacgagttaatgggtacagcacaccaacatggcacatgtatacatacgtaacaaacctgcacgttgtgcacatgtaccctagaacttaaagtataaatatatatatatatgtatatatgtatatatatatgtatatatatgtgtgtgtatatatatgtgtatatatatgtgtgtgtgtatatatatgtgtgtatatacatatatatgtgtatatatgtgtgtatatatatatgtacatatatatatatatataagaaatggcagtatacagattaaaagaaaggaaaaaaaactgtgtctgcttttcatattggatagagtaagaaaccagtgctaagctaatatattttgttttaactcatgtttctttcccctttttaaagcaacaaattcgtatttcttgtcattgttccacacattggtaaatgatgatttaaaatctgtatttgcacctgtggaatccatggactcctggggctagaaagggtgtcaagagtcacttctcagcgttataactgctcagaaaaaggactgcaaggaactacaccaaatatttaaagatcattatctctgtaggtggatttcagaggaatttaaatttctgttcttttacatttccaaactatattttttctcttctgaactttaaacttttttacaagtatgcattaatttttttaaccagtagaaacagtaaatgtcaatgaatgtgaaactgacatactcctgagctgatatacaagtgtttgtgccctctactaacaagaatattaccatttaccatgaattgagcatttgttgtgtgctgttagccctgagcatgagacagacatttcacctaactccctcttttcatgcccattttacgaatgaggaaacaggatcagagaaatccaatgacttgctcaaagtcccacagctagagccgcaaccagctccatctgctccaaaggccttgcttgcagccagcctactccacagcttctccgcagccaggaaggttcctttctgcttgcttgcttttctacgcggccactgaaagcagctgtgacgatatgtaggtcatactaaccacaaatattaccaagaccacggaactgggtgggcactttggcagcatcttggttgtgactggtgacttttctcccacagtcaaagaaccaggtcagttcccaggctcacccagcagacagtctggggcagagacaggggcagcgagcaagaacccaggggaggggctttgctacgcaagaaactaaggaaaacactggtgtgcttggggatagggatcccgcttggcaaatgcggaggcctctggccatattcggtgctgccatacacaatgccacccaaggaggtttcaggtccagaagcgccccaggtcacctcagcaggagtcccaggctatggacctctgaatagatgtcaagggggaccctcctgcccattgccacatccctaccctggttacatgttactggtgtttctcaaaggctgctttgccaagtgggtggcccccactcatacatgcaaaatgggctaagaggagtattcttcaccccttctaggagacacaagcatattcagacctggagaagtgtcaccttagtgagatctatttaatggtgctggacctttgagaaccatccatacaagtcctggagaacagcaaactaccgtgggagagagggaggaaggtgcacacggcatgtggaggaagctgagatcctaggagcaggccaggtgcctccagcaacatccctgcacttcaccccggcaacccaggccacaactgcagtgcagtgagctaaagggccacagcctggggatggaacaccaaggccacgttccctgcctccacccatgctccccgtgtccgcctgtcaaagcttctccagcctgctggtcctcaaaccctgctccctgtgcccccactgaggctgcgctgcacgggctcagcacacagactgctagccacaccacccaagttcaaatcccttacctgcctagaaccggcaccatggccctaggtgagttatttaattaggtctgtgcttctgtgtctgtggtggtaacctggcatgacaataacagtagctgtgtcccagatactgggatggcgatggtggggatgggcaggtttggtggctgacgtgcacccaccccttctgccagcatcttgcacatcatgggagctcagtgtacactgacaggacttgcaggacacatacagcctttgaagctaaactaccctttggagaatcgtgactccctccacctctagccttcctgctttcagccatgataggcctaaagtctgagcagagctgctcaccaaggaaggactaagaggagccacaaggagcagctttatttaaagggagagatacaactgatcagcagcttttcctccttgcccctcatcttttcattgtcagtttcaaaacaggccagtgctagggccagagctaatagcagtggtggaagtggtcttggttacagtaagaactttctaacacatttctgggtccccaaagatgctccagcccacgcaacagcctcctggctccaggctggctgctgcaggtttctcagacaatggcagcatctgccctgggacagcctccactgcctaactttgaggtggggcacaggataaaaccacagccagctgaggcttttaaatctgagccaaccatccccacccttattttcacagagtggctgcaaaaccaccttgccgggccaagctccattaccacaagctcatctcctctagcaacttctgagctggctgtccacctaaggggccagaagatatctggctgacagagttttctgggtcccaggccagagtcaactttgcttttgttttgttttttgagacggagtctcgctcttgtcacccaggctggagtgccatggcacaatctcagctcactgcaacctctgcctcccgagttcaagcaattctcccgcctcagcctcccgagtagctgggattacaggtgtgcaccaccatgcccagctaatttttgtatttgtagtatagacggggttttgccatgttggccaggctggtctcaaactcctgacctcaagtgacccacccgccttggccttccaacgttctgggattacaggcatgagccgctgtgcctggcccagagcgaactttctaggggtttgtcttcagtggcgagaagcccagtgctgccctcgctgttcacgtttgggtttcgttccaccatatggagcggaagagccccaccaaaatgcttcaggagacagaggaaattgaggcagcaaacgaacgcagagcaaacgatccatcctcgctctggcccacactgtctcaagcatgagggcaacacaagacagcttggaaaagacatctcactgggaccagacaagcaacccagctggtacgtccagaggaatgccccagagtaatgccattttcattgtaaaaattacacttttgtgcactgagatccgttgaatacaactcaccctgataccaaggctccagttagccaagcttcacgagcactaagtgcccctttcccacagccccctcgccagcatgcctgcttatcacctgggggggcatgggaagggcccactcgaggccaacggtgagcacggcagagcctgagacagccgagccagctgccttgtagccctgccacattcctgggccctatcgagggccagctttagcttttggtgagaaattgccaagcaaatccagtgactttccaaatggggaaatcgagacgtaaggtcatctagatcaggtgccagcaaacttttcttagagagccagagagtaaatatttatgttctgtaagctatcgggctctgtcataatgacccagccctgccactacacaaccctgccgttgtagcatgaaagcagctggagacaacatgtatgtatccaggcagagctgtgtaccaataaaactttatttataaaaacaggcaatcactacatattgggtacaatgtacactacttgagtgacaggtgcactaaaatctcagacttcaccactatacaattcagccatgaaaccaaaggccacctgtaccccaaaagctactgaaattaaaaaaaaaaaaaaaaaaaaacaggcaatggaaggatctggcctgtgggctatggtgtgctgaccccttctctgaggtgacagctgtcaccactcctggaagacatggccataactggagtcatgagtacagtgaatgtcccctgaatcaggaggttccaggggtctgtccactcagcagatctatagttagcatattaaacggaggtgtgtcgcatcccacacagaactcaacagacactgggacctctgtcctctgtgagtgttccccaggtcatgctgtgatgagaatggtccccagaaggttgagagaggcccaggagcagaagggcccatggctgccctctaacccacctcaactgcagaggaaaaaggcagagtctagctctccttgtaagccaggcctcctgaaagggcccaaacaggatctgacacctggaataaaagctgcgcctgtcctgtgcttttccttctcccagctggtgggctctgagacaatcttacagccactgtcccgcactgcgaggtctctctaggcctcaaggccagggcagtggggaggagggaagggaccttttactgtcctctgccaccaccaccccaacacctctggtgccctgtcaaaagcacgagggggttccttcaacaggttcctgggctctaccaaggccaccattactgcccccgtttggacactgctcgttgtccccacttaaattcaagtttcagatttcagtaatgatccaatcttagcctgcttcatccacaacagtgacaactgtcatcttagactgtcttacatggctctgacggctggcctagcaggggccagagcaagctccctagatgacgtcatgtgagatccctgctgccatcccaggtctgggctccgatcggtgagcccggctgcttggctgcctcacaccagggatcctcatgtgtccaccacggcaaggcaggaaggcctagccaacccctcacctccatgactctagccctcactggaccagacccctttgtggacaacacctgagatgggaggggcctggcacccagagccctgcccagaccccctcctggggagtggaacaagcatgggcctcatggccacagctggtcctgtgaccgtggccgctactctgaacctcagcctcttccgtaaaacaagcacaacaatacccactttccagggctgtaataaagataatccacagctacacaaacgcttagcacagtgcctgccacactgtccccagtaaacaatgctgtcatccttgcttactaagtatcatcaatggaggagctgatgtgcccaatggggaagaatccaggcctcctgcctcagtttgtgagttcgttcgtccgtccatccatccatccatccacccacccacacacccacccacccatccatccatccatccatccatccatccatccatccatccatccatccatgtattcaataaatttttagagggtgggcacagtagctcacatctgtaatcccagtgctttcggaggctcaggcaggaggatggcttgaggccaggagttcaagactagcctaagcaacatagcaagaccctgtctctacaaaaaattaaaagacttaaaaattagcctggcatactggcatgcatctgtagtcccagctacttgggaggctgaggtgggaggatcacttgagcccaggagttcaaggttatagttagctacgatcacaccacagtactccagcctgggtgacagagcaagatcctgtcaatcaatcgatttttgggaaaccactcacaccttggtaggtgctagaggtctagttaaagaaccagacaggtacaggccctggcctcaagggccagctgtcaccactgcttggtcaccgcacctcaagcctggaatgcccacctgtctacaagcctagaccaggtgaaacagggtctcacacagagcaggaacgagaaacggtcactgagtcctttgcacactgaggggcaagtctcaaatctaagcctgtgccttcttgtccttgtctttcaatgtcatgtgagtgtggaccccagaagaccacaaggcaggctgcttctcctcccagagcctcatccctgcctctcagagctgcagtggtagacaggacacacacataaagtgcaagcctgtgcatgaccaaagccatcagtgctgtcatttgtgtgttgaccaaagttccaaggagtggggcctaggccaaaggaggtacagagctctggctaaggttcctgacatgaaccacactgccctcgttcctaggaaaagagacaatgcgagcaggagaccaacatcagaggctagagaaaggccagcactggagcggctgccaagtaaggctccggccccacctctgcagaacaggcccaatccgtccccagctgcaagaggagccagaggagggctgcccaaaccaaagacaaaccagaggtggcctcccacagagggcccatctcccatattcagcactttccatattgaaggagctcgcgatgtacttggtggtcttgttaaaacacagactctgatccggcaggtctggggtgggcaccgaggttctgaagtcccatcgtgctgccaggtgatgtcttcgtgccggaaggtgaactgcactctgggagctggaagctttccatggtgattttgggcctttaacaagggttcgtcatgggccttcatttaccccagggctcattttgttccagggcgcctaccagcagcctatattccctgtgcttctaccctcgggcatctccagagaccgatgctactgctcctcacctcctcccaccaacccaggaggctctgggccaaatctcccaggtctcccgagcctggcacgggacacctgtatgcccagcctccctgttcgtcagtgtaccccatgaacactgcaaggtttaagtgagctaacaccgtgccaggccctgcggtcagtgctgcctggatgcctccatgctttccagggagcttgggtaccaggttcacacagcaccaggcactgaggagcttgaggctcaggcctcacctggccaagacacacctgtggtgagcaggtgccggtctccacttgagaagggatggagcttgcacacactggcacctcccctagggctggcccccagggctgcctgacaccagcagatcaagcacaagacttgccagagagcagcctccagcacctccatggagtccctgaagggaggttcagagctggggcccgcttaccccaggcatgggaagtgggcaaaaccccagccaaagcaggcctccggggccaaaagccaatggtggctggtgcaccctggcatgctgctcgcctttaggaaacaggtcagcttggggagcttcaacactgggccgggaaggcagagacctgggctccaagcccagatccgccatcacaatctgcctttctaccaggggctacaaggcccccaagtcttcaaaacccgcagggctacagctctgagggtagaactctgcgcagatggcacaaagctagccaactctccggccctcagcaagtcacctaaggacggcaaaagacaggacctggctgtgcccaaggccaggccctcagtactcatgctcagtggttaccccagccatccacagaaatgggatagtcccgtattccaaaacaatgatttattaggcacttgctgtatgtaggcactgcttttacccaattttcagaccaagaaactgaggcacagagaggttaagtagctgcccagggcagaagtccccatcctctcactgcgtggggccagagggaagtcccaaagcttctttctgctgctgctcgatccaggactgttgcctctggctttctcggctcctgatttctgactcaggttggctccccaaggacaaacctgacaaagctcctttttccctgatgaactttcccctcctggtaaggtagagggagaacccacctgactggccctacagaggccagccccagccagtggccctcgcttgtgtgcaccaggctcttggaccctcattgagaaccaggcaagaaattcccaagggcttcaggccccagcagttcacagcctccagtgctctgcacagttccacagccccctttctccactgaagggtaccaaaggcgtgggcatagccttctcttactgccccaaacttgtctatcacctgagtgaggttcaagtccctggccacctgcccagggccatccttcgctgcccacagaataaagcctcaactctccaggtggctctcccaaccccagttccagcccaactgtctgctcctggtcttaggaacatctatgtgcctgtgtctcctctccactccaactgatgggctgcccaagcctgttcccctgactagagagcttcttagctcccctgcaaaggagccagtgctaggccctgcacatgacaggcagaactcaaaacgtgcccctcgcttcctactcctggcttcctagaacaatcccatatgcatacatggaggtcctgtgtccatcatcttatttcgtcctggcaactgctattatggatcctgctagatgggtgagaaaaccaaggctcagaggatacagccctgggcattggtcacgtgggccggtgatatggccctttccacgtttctaagtgatgacttgttggtgctgtgacctccaggaggccagggctaactgtcctctccattgctgcatccctggtgcctacaagggcctgactcacagcaaatgctaggtaaataaatagtggctgaacaaagagattaatctagaattgaatctcgatcctcagaggacaagactagctcatcttactgtgactcggcttatagtcggctacgtagacacagctgtctccaccccagccctgtagcctgcacctaccttgcaggtaaggatggggtcttgtacacgctagtcttccctgagccctggcacaggcagttgtatacagctggtgttcaatcaatgcatgctgatttgaaccagcttcccaggttattggctgcctagactctgagggcccagaaagttcccctggtgggcagggccacgttcctgaagctcccaggctgataagctagatgccctgacattcctgtgaatccctcccagaagggtggggcaaaccagagccacaaatgcaattttccaggaaaactatggttaagaggctgccaagccccagagacaggatagctctggaaccttcggcttggtccaaggccacctctgccacattccttctattctggggccttccctccacctgccactgcaaccttccaggctcacactcacttccagagtgctggtagatgggggctcaccccgaagagctccctgtggatggggcttgcagctggccagctgtgtagaacctgacgcgagtggctcgagcaggggacatgtggggacaaaggcacagcccagtcatgaaatgcaggaccacaaccgtggaaaaatggcccagggcctgtcatgctgcaaagctgtcttctcagcaccccctgatgagaagcccctgtcttcctgtatcaccccgtctcccaccacctcccatctccccagccctgccccggccacacgccaggaacagcaggctaagcagggctgcacgggtacagtagaaaagaggcctcagagagcagggcaggatgctcagagaaacagtgaactccccgggcctcccggaccagccccacgaggagggtggagcaggtgagcccaggaacctctagttccaccatggacagcctgtgggcaccagacgctctggtcctcaggtctcctggggcctgctatacccgaggcagagggcacagcccagagcacctagcacctcaggcaggggcctcttgcccagcccctcctttaccagctggcattgggcccttccagaggaaaagggtctatggcagcaccaagtgggaaccaaggctgacccccaacccccccacactcttatacccgtaccccaaagccccactcagcaaagctacatgcagtcactgaatgatggagcagtggccaggccaaactgagacctgctgtcacctgacacaccagtggatctctgaaaccagtaagaaaaaagaacataaaatagtgcattcatgatttacttacatcgatgacatgtggaaatgatagtattttggaaatactgggttaaatatactattcaaagtcatttcactttcttctcttaataactggctactaggaattttaaattatatatgtggcttgagttctggtttcactggactgcttcctctaagactcagccaccgcctgtaaaatggataacgatgtgccttcctcatggggctatctggaggagaaaatacaacaggtgagtttcttctgcaaatcatcccccacctcacctgccaacagtcagcagcccacagctgtggcctggcactccacctgtgtggtcagaggctgccctctgagcctccacatccacagggctgaggaggaccgggcagggctgggagaggctcctgttcctggtgcctggggtgcgaggcacctgactctccccattctcgcactacagcctcccagccccgcccggggtcacagggcagagggctgctctctccctcactggactgccctcaagctaatgagaataatgcctccagaaatgcctcaaatggaagatttcataagaagcagagacccttctggaagatcacaagcagcaacaaaataagatcaagaacaccatgctggtgctgagcctctccagggggtactgcacagctgcctgctgtaggagctctccctcatcaggctgcttcactcccacgacatggggaggaggacactgaggcccagggaggggcagcgacttgctcagggctactcggctggtgaggggcacaccaagccccacaccaggcccacctatctctggagcccagattcctcctagcaggggagcccaggccagacactgccttccatttcctgctgtcctaggtttggagcagatgccggcatgcatatttgttcgtagttttccctgcgtgaatcaagctgaagatctggtgtctctgctgagtgacaattaacctcacaccatttcagatgagatattttttcttgccaaacagttaatgctgcataatcagccaacatctgcggaaatgctctccccaaacacacggccatctcgccccttggcctaagctgtttctgagcaggaccacagcccccacagcagggtgtttctagccaccggctcccctgccgcagggtatttattcccatgtttatttgccatcaattctcagaaaattctgttgcccaagactgttctagattacagtgagatggaaactctctaggtgaatcaggcttgtttaaagctggctaccaactagcaagggggatacgggcaatgcactttcagttagaactgcctggcagacaagagcacagcactgtgcccatgccaggcaggacctgtccttccacaaggggacacaaggtacagagccagaaaggcacgacaagacccaggcaacccacaagggtgctctccttgtctcatcttcctagggaggcacaagagcaaagaggcagctgataagtggggccaggggtcatgaggcaagaggggacctcatggaggctgagtgggcccagcaagtgtgcacagaacaggcctggcggagcacggtacggcacagccaccgttacagtgtgccctcaaaccaccttccccttgtgtgccaagtttcaagtatgggcactgataggccttttccttctgggacacagaatgccaggttttcctgccactccttcccaaggcctgatgtgccaaaggcgcctctcacggagggaagtgagtggagggcatccggtgctgcctccggagcagctgccaagaggcccgagagcggaggccagccaggcccctggcctggggaaagtgcagggctggcttggacctcctccccgccattcaagacaagccattttggggggtgtagggggtagaaggcagtggccaagggctcagaggtcttcagcaaagtcaccaaaaaaatggttcacaaacgttctgctttgggcagtaagaggattatttcacattctggatgtgtccacttgagggatgtaacgcgcactgtccacacacctccgctcagtgtggcagagcaccagatcactgggcccttctccctcgtgtcccggacttatacaacaggacagctgaaccgcagtgccaggcagaactaaagcgctcttccagagaggccatggtgctggccacagagcctctctctgagccccgtgcccggctttaccagcctgctcatagctcaagaaatgcagagtctgctcaagggctgggaggagaagtcagggccaccggggattcactgatccatcaggtgatgggcccggaggatgtggtaagtaacagccacacattctgagcaccacctgagcaccaggtcctgggccaaaggctgggagcagccccacgtgaggatgtcaccatccctacctgaccgtcagggaacccaaagcctagggcaaatcccagacttcccggggccctgtgcttcacaagtggtggggagctcaccccaggaagggagccctatggagacatgggggcccacgggctgtcggggccaaagagtgagtggatcccactcaccgctctgccacgcagccagcaagtacatggcctcggcactcccttttcttccctggaaagtagaacaggaggagcccctcacagggtgggtgaggaccacagggtgggtgaggattacagggtgggtaaggaccatagggtgggtgaggattacagggtgggtgaggattacagggtgggtgaggattacagggtgggtgaggaccacacacccgagggaggacgccctgcaaacaccggcccgtggattaggagttagtgacccacttcccagagccagggtgaggctgatgtgtgtgcagatatgggaggggagaactcagacacccctgtgagcctcaggccactcgctgccactgtccagcaacagagggcgggcggtgacactcatcaccatgagaggcacttgcagaggtgcctgactaacttcctctgagcctgtccccgacactggggccctgcctaagcatctctctggtatgctttcaccctcatgtgccttcttgccgtgacctccttgaaccggtttccctggggccgtctgcggtcgaacccccaaggtggaagataagcatagcagtcaggtaaggcaggtgactgagtatcccatcagatcctggccccagagccctgatggcattccaaccctgcgctccaggcaaaaagcccgctcctcaccccagcctgcaaggccaaccgtgatggccctgccgacatctcaagcatcccttgcacccccgactcaggaacctgtccccccagcttcactgtgccctgcgctcaccacgcccactccgaccccagtcaccgcagcctcgccatgccctgcactcaccacacccactcccacctctggggcttgccttccctctactcaggacattctccctgattatctttgcaaagctgaacacatctcatcatctgtgactttgtgccaatgtcacctcctcaacaaggcctccctgtccctccaatctaaagctggccacttcccattccacctcctctcatcctgcctggtgatccaaaccacgctggcctgctggattctcattagcacaaatattgccatcagaaagggccctgcctgcctgttgtaggcctgaatgacatccatccccctttctgcattgcagaaacatccccagggcctagctgaatgccaggtggccagcacactccaggcaaggatctgctgagtgaagaactaggacggagctgcgatgcgcgctagaagagatctcccgccccgctggagaacgttagacagcgcttaactgaaggatgctgagcagagccaggctgggggacagaggcagccgtacatctccccgtctgcttcctgtgctgtcaccgtcacccagccatgccgcgtgacctgcaggagcaatctgctccattcacagcagttgcttcccatttgctgcatttccaacattcacagaaccaatttcatcaccttccctttctgcgggaccagctagccggcgcccctgcctctcaggtcttgccccagccctgtgcggccaatggactccacgctgccaagctttcagaagtgcagtctctgccctggggtcccctagcccaaggtggggagcagcttcctgtagctgcttctgcatgatattaatacttcgttttctcttcttggcttttcagattttcagaaacctagctaaccattgctcacagtgaattcacctggatctaacgggctggtttctgtccccaacaggccctggctgatccaggaggcctgcctcacccactccacccacagagctccagcagggaaacagcgggggcctccataccgccaccactactccatgaggagtaaatgcagtctgtggcccttcagggagagggtggggtgcctgatgacctctggtgacacattactgatgtgagctcgcgttactgctcacaaactaagcctctggtggttgcattatattttgcaaccaactgttgcttttgttttccaagagtttttttttttaagccactcctccccctcccaaaaaggaattatccaagagctctactatgtctaactttcaaaggaggcattgttaatcttttggccataaataggcaattaacacccactctgagtctagtcaaaccaagttcccgccagcatggggactgcagcaaagggtttgttcttcgtgtggcatttgctttctgatttcttgactgtggcttgaagttgcaagaaagagtggtaattccggatggctgataccacaaaaatggtacataaatgggctcctgtcagcaggagaaattctctactgatgcagtgcctggggcgacagaggctcatgctgccaaaggcgaagtgggctaaagtaaaggcttcacactgatggacccacaaagggcagcagcctgcatggtgtcgggaaaaggcccggtcaggcaccagccgtgctgggctctgggcacagctccgtctccatcccacacccatctccgtgatgcacctatttgtgcttcctgctctggccctcactgggctctcaacagcccgcaggcaccatgctaacctcgggctgggaggggcttcccacgaggcgttctcctgatgtcccggatcaggaagcaggaataaggcagggaatgccgaaatcctcctggggttggccaggcctccctttcgctgcatcctctgaggcccagctggggattactaggcttcattaggagaatcgaggaggccatcacaggccccttgtttcccggagctgctgtcccagctgttgtaaactgaccagatgtggcacagctgagacaagatccagcgtgacaagcgctagaaaccatgaaagaatcctcctgtggccctaagctgcccccagcccttctccagcccagagttcagaatgcgcagccactttcaaatggacaagaacagagaagcttgggcaaaggagtcagaggtttgcaaactgagggctgacaggaaagggtaaggaatggggcctccccagtggcaaggagcagctgggctagcaaatcacagatgtgcaaggactggggggtaagacagtcccatagataccttcatacagagacaaaataggtcatggtgatccactggatttcagttctactgagaacagatcaagaagaaatacagtcaaagtgagggctgcaggttaaataacaagagggacttacaatgagcacacactaaacagggtagcttaaagaaagttgccacctttggggattaggataattgattctctgcccagtgaggcctatgactagggtgagttggaagccagccctgctgctttcacctcgagaacatttcttgagccccttatgcctatcaccacttccactgcccccacccttgtctagcccaccttcatgtttgccaatagcctcctgcctggcctccccacctcccccagaacctacagtccatgctgctcactgttgtcccaaaggagctttttaaggggtgctattgctcccctgcttaaaaccctctaatgcttctactctgcactcagggttcctgtcattcattcactctgccgttgcacacaaggcaggatatcaaacagggtgtggaacttgcccttaacaacccacccatgagaacttgcctcggaaacgttcaaccctatatactagaacaggctttccagacatttctgaagcagcgccttgtactcgactcagcataagttaaccccgagccctcctgcatgggaagtttcattggcaggcggggacaccattgctctgctgggtacagcagctcagtgggcactcgccctaggacctggatccctcctccaggtcaggcccttcctaatccaggctgagctggtacctcctgactgagggacctgaactctcaatgccatctccatatgacacaaaactagtccctgggcatctgtggagtcactgggctaggaatgtgcccatctctgctgcccccacaagccccagactcacctagggagcttctgggaccccgaggtactggggctctgccccagacctgctaattcagactctcttggacaacgtctaggaacctgcagtgtgttggcttcccagataacctgacgcccatggctacacctgggcagatgcatgcatggtcagaaacccaaggctcagagaagcagggcaacgggctcacagtcaccacacagccaggtggcagagtgcctctcaaacccagctcttctgactccaacagcagctgtgttccaacgacagtgcacctctctttcccttaggatatgagaggcctctaccacgtggcaataaggcaaaaccctgccctcagagttacagagcccgggactcataccccagcagcaccgctcaacaactcagctgcgccctcaggtgaggccttcttctggggagcagggatgcggcagagcacctcagcgctgcagagacaaagaattcctgaggggaggacagttcacactggatgagcagcaggcccctccttttgccaaatttctccccttactcctaaagtgtgactcccaatatggcagccaacttttactgagcacgtgtcctgggcacacagaactaagctccaagcgcttcatacaaatgaattcatttaatgagacatttaacacagtgagagagggtgtcgccacccttcctcgaggatggggaaaatgaaccatgaagaggttccatcagttgtccaggatgaggatggggctcactccatgggcagggctccaggctgaggccctgctctcccaccagccctctgtctcctcgtctcagcccacgctccctgcttctccttcagaagcctgggaacgacattagggtttctctaaaccctcctctgtgggcccttggagttgaaccagtcaaaggggcaagagccagctgacccacaagcctttcttactctggcttccatgaagcaagactggcgatgtcctcagatgtggtgaggcctcagctggtaaggccttgttctccctctggcccataggctgtggcctcccaagggcagcgcctgctagggcctcccaagcctctttgccagcaccagagcagggcctggcaagccaagagcactcccagcatggccggggctctcatctgagcggctggcttaggaaagggcccctacttcagagagccggggcctcccagagtctcatagcttctcaaacattctctgctcaggatggctctcaattgaagcgtggaaatcaccaagtggcactaaaagctgcctccttagcagtccccagatgaactcctcttccccaggagatcaaagctattgtggcaacactcggccccgatcccagtgaccttaagcagattgcttgtgcaacctgagggctgtgactagagacagaaaggagggatccaggcggaggctgcagtgagtcgagatctcaccactgcactccagcctgggtgacagagcaacactccgtcaaaagaaaggaaagaaagggagggaaaggaaggaagggaagcagggaagatgaggactagagctgaaactagtctcctggaagcctgatgccagcatgcgccacagctggcaggatcccggcccaccaagagtggagagcccaggacactgcccagagcagcagagggtgtggggcgagctaccatgggagcaacagaagaaaggctgcagcaggcccgggctttctttgttcatcaaagctggcatttgctgagtgccaaccgtgtgccagatccatgcgacatgattcctcccacactcatgagcaacaggcactgccattcccattttacagacacagacatgaggcctggggcacacagctcaaaagtggcagaatggggacacacccccagttatctgactccgaagctcccacttctcactgccacactctctatgccccatgtgcatcagtcctctggaagggccagctgattggtcctcacccaggaccaagcacagcagtgggagcactgagcctggggtcaagaggtcagggttcccaccttccgaggtgcctcaccatgtgactttgggcaaggccccaactcttcctgtactctagaggcttcatcctcaagtgaggggattagaacagagatggtggatgacgttcaattacccatcaattagcaatggctgccaagactgccaagaggaggattctaagacctccactaagttcacctgaaaaggctgccgtgattgattagcaatgtctgtcaagagcacggaaggaggagtgctagttcagcatccaaagctgcccccttgacatccctaaactctgacagcccaggtcttacaggctctcttcctttgttcaagcctatcctaactatctctaagtcagaagcaactactctcgtgtgcctgcccacaaaagtttttgcctttacttgtatttagcatttctttcattgcaatgggctttctagggctttccatgcctacctctctcactagatcttcacactgtctgcagtctgtgttataaggggtgctccacctctgaattcctctacttgccgtcagcacagcttcccaccctgagaggaagggtgctgagggtgcagggcggtgggaaccctaagcagctgaaggtgaacagccactggcaggatggacaggaaaagtcacaaaggtgcaggcaagctgggcctgccgcacaggaacttggccaaggaaaggcacagctggcctgcagctgctgggggtgccagcgcaagaagtcatgtagccaaccccatggcgaccaacaagggccactgtccctcaaaggcggccccaccagcacaaaagatggaaagtggaagctggctgggggggcttcacctggggaggacctgtccagcaaagagctgcgagtcactgatgagcatacgcacaagctctcccaacttcctgcagcaacccctcatcctgcccagtccctgcggccccgcccacccagctctcctggactcacccccaggaatacggctctcagaggcttcccaaagacgtgctggcatgctggtttctctcatgcttcttttctaccccaaactgcccctggccagctttcacggtccctcaaacatctgctaacacaacagttgctgcctgttctgaggcctgctcagggaggttcggggactcagtgtgtgggcagccgcaatcaatcaaacctctgtttcgacatcccgacccctccccacaaacatcttgcttctgtttgaagcactgttgagaagtacaatttgttgctctttcaagctgaccagcttggagttaaaaatacagcagggactatgacacctagggggactgcattcaatgggtgaactttttaattgttgcttttttctgaaatctttgctcacacacacgtgatccatgtctaaatggccgcgtatggctcaagtcttgctgggagccaaccaatgctgggtggtcaaaccaggtctcaaaaaagcagtaaggaaaatgtcagcaaaagtcctgctaataaacaactcacaccctcaggctgggccctgccttcaatggcagacattgtcattgtgcaaaaggaaggctgcagcctcacagagaacaccagccaggagggccaaaaacaccacgtaaggaggaaagctgtgcaggaggcccacggggccgggcttgcgcagggatcgcagcatagccagtcctctgagctgcctttggacaacctgctctgtggaaccaagtggttgtaattacaagtacagggagggcggccactgctggactaggtccttgcgtcatttcccccattagggctttcctcgctacagtcagcctccccgactcaggatccagatggccggctcacctgcagcctcattcagcatctctgcctgctctcttggcactggggttttcagaagacatgagcaaagacaatctgaaagcaatatctacaccccaccctgtgtgtctcatccccgacagacaagagcccccactgccattaactggacagctgtgccccagggacgtggctaggaaggggcagggtggccagcaggcccccaggatatttccaccctagtttcaagggcaacagacaggagaatgctcacacacggcgaactccctctgacaagggggggtgaatccaattgtcaccatttcataaccctgggctctgaacaccgagttgactacaggctgagctgagctgcagggcaggcctccttcccatttacaaaagaaaagcaaagaggcaagaagatgaacaaacaagacaaagaaagtggcgtgaacagaaaagggaggatggaaacacagggaaaacactggacaaacaaagaaaaacaggcattcttacagcagactgagggcacctcccaggaatgtccaccctctgctcctacttctgcctctggagacacccagaaacagcccacaccctccctccaagtcctgcgactgtgacgatgatcataagtatctgtcagcacccggcctgtgccagccaatgcactggggggagtgtgtgtacatacagatacagatacacacacacgcatatcaacagatgtggacacatacacatatataaacacacacccatatggatagtgcattatccacacatgttgtttcccttgctcctcccacagtcctgtggcggtggtggcatctgctgcacagacatgtcaggcaatttgcctagggcttccagtctctggccccacctctggaggccttctggtttgtcaatgtcaccttctaaatgcagatccaaaagtgaacaccatgcccagaaaaactctgatgggcacagggaccaagagatcttcagtttcctcaagagagactggaatggacaagctctgaggtcacatctcctgatatcctctgcttctagcagagtctacaccccagggcacttgctcctgctgaactcaactgtggatacagatgagggcagggccttggacctcagagcttcctgccctcttactctctcgggttctctccctggaccctttcctgctggcggattggaggggctccagctaaccacagtctatctggccacaccgaatgatggccagagggaagcccccgtgtgctcacacacaccctcaagatctgctctaggccccagtcgggacctctaggggagctgcagcttttcagaatggccagctgctccaaaggtctaactgaaaaggccctctgcagctttaacccgaggctctcacacacctggcctcagaacccacacacgaagggcgcctttacaagaatgcacaagtggagctctcacccccaaaggcgaatgtgtaaaccaagatcaaaaggcccacgaaagagaagccagagcccagcggaaggaagcgtgggccacacctgggtaccagcctacccttccaaagatacagaaagcccaactccaagccttgcttccatgggcatgcagagcagaccccaaccccttctcagtggtcccaaatgttgagtgaagccacagcacgcagaggctggggtctgtggccagtggtctcacctcactggccatctggcaacacgttagtccttgtacaccagcaacatgcccagctcatcaggttcccacgcacaaggccgtgcactcgccagggctcttgataaatacacagggataccctaggcctcgttctcagggccccacagaaaagcaaggtccacctccccaggctagaaatcatctgatggcagagccaaagcaggcagagccccatggagagagggctgaccagggtctagactcttggtgggggcatggctcagcgtccacgggcccagcctcagggctctggccataggccttgggcacacacactttccagaggcccctctctactttccctgtgcccgagacccactgccaagcaggcggccaaggacagacaggctgaaccagagcagcctcctcaggctccgcacaccttcccagatctgggaggcctgcctggggctgatgaagccatctatacaactgggcgcagccccactgagcaatgtatttttaaatagtttctaaccaaacgaggtcaagaaatgtctccaatgatgccagtggtgttattccaactgtggctagtaaaatataataacatgcatgttgtttttgttacctatctagctgattaggtaataaaatatgctcagtattaaaaatttagctgaagccattatcatacccagaactcggggctcttggttttcctcagaagtcacccaaatctgtcacctttccagacttttaacctatttaaatttttctggagaagggaaattcctcttggtgtccaataaatgtgttcaatccctgtccagctagtaaagtcaaaaacgttccactacacagcaaaaagattggcacacgcctagagccacaatggaagaaatggaaactagctgagaagaggcaagagctctgccccacaccccttcaggctctcccccaagcggatcccactgacacaggggaggcacaagcataccaccatcttgccctcccataatgccccagccagtgcccaggctcttgaacaaaggtggccagaaagtttggactctggggccaggtatgctttagacttaagacacctgcacctcttcttttctgggtagacctctatgttgggagtaggaactaaaggagagaagagcaaaaccccatgaagagaaactgcatgttctttgtaaaaggaaagaagacccaactgagagaacaacactgggcttggaaggaagtcagctatgcccacctgaaacgcagcgagcgtgataagcctgcctgccgtggatctggccataatgctgagtgaccaaggccatcccctccaaccaacccctctgaaaccatcttcgtcaacaagaagatctttaccccttgaaacccagcgagaccaatgtttatataaataagtccagaaaagatgatggtcagaccgtggcattaagcaaccgatggcctcctggatgaacacagaaccaacagtgttgtgtcccatcacatccgcccatccttgagtcagaggtcacaagggccagcaccacttcctcatccccagccagaaccagatgcagccaactctcgggctcagagacgctcctgatgacagagtattaactccaagttcatctcattcaaatcaatatccaagatcagtgttagcacaaggcagagctccaagacaaagaggataaagtccaagtgacaggggcgtgtggccagatacttcttctacagtgaagggcaaggatgattgcagaggcagctcagaggatattgatcacaacatcctgatggcctcatgtttcaacagtataatcaaaggaataagtccccccaatcgctagctcttggaaaccattacccacaaccctgatctcaggatcagcataatccaagggacactgaaccccagtgtgtgtgtatatctcttgcagcagctgcaggggtggcttcctgggagagacggctccagtgaagggccggaggggattaccagtgtttggtccagtgagtctgcccaccaacaccccgcctctcaccatccacctgcccttgtacccctagcactgagctcacagtgaaagggaatatttgcttgtaaatagaaataaacgctttttaaaaaccaactggaaataatctttctttgaataggatttaaaaaaacaaggaaattaacccactcctgggtatttctgaaactggcaatctatgcttgtctaggacggcccagaaccagcagaggctccagtgagcaccaaggtgactccaggctgctggggctcttacctgtgccatcttggcaaggtctagagaaggcctctgctcttgcacttcttcagggcgccgccttttaacaccgaccttcttgtcgttaaggacacacggctgggagcggctgcgggaaaggccgctggagcgtctcgccagctctggtgttgaggcaggtgtgctgttggctgagggaggacagtattccacaaaggaaaactgctcatgtgagcaagagagggaccgctgcaggtccagccggcctcctcccacggggtgcaggtcagggctccaggtgtcacctgcctgtccacacggggctgagcctggcaccccttggcagggctgccctccaaatcggtggtggagtcctgcctggtcgcagggtgaggagagcacgttggcccgggaagggaggctgaagctggaactcctctgcatggtgctgaagccgttggaatagcgctggacgctgcccccgctgtagcagcgtctcttttccacgggagtccagactttggagcccaagggcctccatgatgtccggcaactggacatctcatcggagaaggacagtgagcggcactggcgcttgctagggggtgctgaggggttcccgttgtggtcgctgatgctgaggtctttgatcagactggtcacagcgcaggcggtcactgcctcccggtgccatagtgagctgtccttttcaggcaggcattcccagatgctggtgctcggttggtcaatctgaagagggcatttcctgtccaggtctcgccatctgtcattttctggttcataaatgacaaggagaaaacaggatttgagaagaccttcactccagccctttattatctccacaccaacagcccgtttcaaacacagtatcttagagccaaaaggcccttagaaaccatccagtccaacctcattttacagatgagaaattgaggctgagagaggagaagtgaatcccaaggctttgagttggaagttggaagcagagcagggcctagaatccagatatacccctgggactcctgatatggttttctttccagtgtaccacactgcctcccaggagaatccaaagcaatatttttcatccaaaatgtttctcatcttatgggtgggaaatcgacttgccctgaaccctgcccctggctgatgagagagtcgggacaagacatctgttaagtgccaccaggttctctgcagctctcaggactgggactcgatgccctggcagaagaccacaaccaaagatgtctcaacagctcggatggccaaggccaaaagatggctggggcactgccaggttagttcaccccaattccaccttgaaagcctttgctgataatagaagctggaacttgtactgatttaggtcacctccgtcaaaatgctcaacatcagcgtcaccaatggctgccaatcacagcactttctctgtgttcactcgatttttcacttaaagcaattaaaatctctaagaacaagtcttgggcttcacagacttaagggaaccacttaaacttatgtattcaggtctttacttgaatacacaaataaataaccaaccctgctatgaaatgctacatttgcacacgaacctttattttgtgaaatattcaagaactatttattgtttttctactatggaatcaggcaccgtgctgggaattttaggagatgcaaagataaatttgacatagttcttgtattcaagtttacagtataaaagcaaagttacaaaatatgccatgatatcagggaacaacctgttagtactattttctcgagcctatatatatttataaatcatgcacatgtgaatggcttgagtcagtcaagagaagaatagaagtgaaacctgaaatgatatttggtaggtatttaaatgcacgccgggtctctcagcaatgcagatcactcactgagcattcagctgggctgtgtaatccacacagccccctgagtgcatgtaccatcctggaccagatcaggagaccaaggcttgggggacactaagcaactagcccaaggccacacagctaacaccagacaggatgtaaacccagcttagtcaggccccagagcgcaggcccttttcactacactgcagcgctgaggtggactgtgggtgagcctgactctggccctggccctaaggagtttatgggtcaggcaagatgggctcaggtgcagaaaactgagatttaacccatgagtgctcgaggcagcaaggactacaaacctatctccactaccagtggccactcctcaaagggcaccaagagacataccccagctgagcgtcacaagcagcagctacttgattgactcaacgggaatgacctgtgcagaccaaagggagggccaggagcccagagaaaaagccgaggcagagctaatggtggttctccttcctcttgggcatcctgccaaggtcagcagagctaacggtggtactccttcctcttgggcatcctgccaaggtcatgagatacaaactgaggggctggggaccctgacaggggacactggtagaactgtccagaggctgtattcatagagggcctcagaagctgaagatgcaggagagaaaccttccaaaagcccaggcaagccagctgcaacaaagcaagactgtcgctaaacatccaatttcttcatcatacatcgttcatctcatctctgaaatttcccagggcctgaacacagcaggtctcaatatctgctcctccaactggattggatcaattacgtccaaaaatcatccaaagtacctcttcctgcaagttgctttaggttgttcaaacatgcttcaccaccaaggaaaccattccctttgggtattcaccattctattaaatcagtttcaacttgacactggtcagcagttgaaagtccaataaactaatatacagtaaaaaaaaatttttttttgagacaggacctgcctctgtggcccaggctggagtacagtggcataatctcagctcactgcaacctccacctcccagattcaagctattctggtgcctcagcctcctaagtagctgggattacaggcatgtaccacacgcccagctaatttttgtattttttgtagacatggggtttcaccatgttggccaggctggtctcaaactcctggcctcaagtgatccacccaccttggcctcccaaagtgctgggattacaggcatgagccaccgtgaccagctataaagtaaaattaaaggaaatagaaactcttgttgacacagtcacaactatcccagttatctgatttaaaagaaaacagaaagttatcctaagaaaaaagtgaagatttatgtatgatgatgttcatcaaaatgatgagtgacagcaaaatggtaaacatagttaaaacgtcttacagtaggggccggttaaataaattatcaaggaataacatggagcatgaagaagcagagtttcaaagaatattaaatgatgtggggaaatgctaacaatataaagctgagcatgaagaaacaggatataaaactgtatagagggtgtgattcctatttagcaaaatatgtctgttgtatgtaaaggtaagaaagaaataaaccgaaatgttaatagtggattggcagacagctggttggttaatttattttttctcttttgttcttctatagtctccaaatgtcctatgagaaaaaatgtattatcgaatatgtgggggatgtgactgccaagcccacaggtgctgtgcccttgcttaactcaggaagtgagccagggtcggagcgggggcccacagcccgccctctgctgggttggctcctctgggttttcaggaagttgccatacaaaatgctggccactaacttctcttttgagacaaggcactgaggcaccagatgggccaggaatgtggccggctgaggaagaaaccaatgggcttggcacagagcagcgagggtggccggtgctcacggagcctgagacatactacagactgcgtctccgccaggcctcggggaaacccgtgacatgaaaaggagttgatcccactctcagaggataccattttctgttccatttttgcaccactggcctggaatcttccccatctctagggaaatcacttccaaaaggggaatcgggagccagctaaataggaacacaccatccctcccatctgccttcctttcccatggccagcctgcgatcttggtgcttcttgaagggacccctcagggcctccctactccaggcctacctcctcactgcctctagagaactttctgaagcccccacctattgtggcccattcgcttcagctgtcagccactgtttccgggaaagaagacaagcatttcagactggcacccgggcccatctccacatcattccccacaacaaaccctacactccaggtatcaaacctcctacgacagtggaggtcagaaaagaatcatatagagtcaaaaccatccttgaagaattcctgaaccagcccacaaagtacaactcctccccccagctttgtgtagacaacccaaaagggtaattcttatgcaccagcgattctttataaaactaaagtttaataactagactgcaggaacaagcacagataagatctatatgcagaaaggctggaagtccagcttgctgggccttgaggtaactaccaaaacccaggggcatcagagctgggtgatgaattcctacaggacctactccttctgtgttacagagtaagcctctaaggcctataagatttctttgtcgtagggaagattcgaagagtcagtttttaactgtgaagagaagttgcagcttcccccaaacatcagctctttcactcctttgcaaagaacattccacacctttgcaaaggcctggaccgttcttttcctgcctttatcttcctttcaccaagagtctcctcatttaaaaagccaactcaaagctcctctgaagatacacctttctcctagctctgtgatcgtacagcacgtatgtacctgaactttaattactgatctgcgtacacatctacttctcctcctaagccacagactctcaagcatagccccagtgtggctccccagtgcctagcacagagcagggcacacagcagaccttagttggtggtgcatgaatgaggtagtggattgcaaactgcagataaaagctacaagaggatgcggtgttctctgggactcacctgtcttttgtccttggcaaaggtgagtcttccttggccaggtaagtccaaccaggactgtgccctgaaccgtctgccctacctgggccatgtggccatgtgtgactcagcaaggagatggggttgacagagtcacgtctaaaatactttggaaaagcaaagcactgctattgtgtatcaacaccagccaggtgaccacttgctcagtctgcaggcagataatattgtaattgtttctatctttatcgctttgagaagtacaatacgagaaaagtaaaaacaatcaaggctatgtttagccctgtgttttccccattcgctcagggaacagaaagcgatttgttgggtcagatcaccagacaaaagaaacaggaatagaagctaatttttcatggcaaactgccccaagcgctaggccctgacgtcacaccatacaaagggcctcggtaggcctccgagaagaggatacagggtgcccccgccccctccattcaatatcacttctgcacaaacaactataactctttcaagtcacaattgtcatggatgtaggagtctactgagcaacagtcacttggtgtagtggaaagggcaaggacctgggttcaaacctcagctctgtaagttactcagttcctcgtagctattatgagaattaaataggcatctcatacagggcatagagtaggctctcaaaaacagcagtcatcataaggataattaacggtactggaaaacgctctcctagctgaggcttgactcagccagagctgcaacagggtgccagcctctgtggaatccggctggaatggaaacctggcttctctgactaggatttctcaaagtgtgacttctgggccacctacaggagcatcctttgggggtgtttgttaaaatgcaggtttctagaccccgtctctgacttggtaaatcagagtctctctgggtaggcatttgcatcttaataagctccccaggttatttcaatgcaaaaatgttgagaaatgctgttctggaaagcagatgacatggagaactgagttctcaaacatctgtccgaatggcggcccatccagaccatccagcaccactgcccagaagcttcaggagggttgacaattctggtctctacaaatttgaattcataacaacactgaaagttggtgtttatgttttggtttgggctaattccaggaagaagtatggagaaggatcacttcacccatcagaggtttcacaggacaggatggggaccctcagggcttccttctcaagctacacaacatgctcttgatggacagccactagcaaaggccttagaagctaactcactcctatgaacaagatgagtgtgaagcctcccactttctccctgagaacacgcaagggcccatcagctgtgtcctaaagatacgcagaagggccccccatccatctgcagcctgacaccaagcccctggcagacctgagcagagcgcgatggcccacagcctgagagcatggcaccagcccattcagttctatgctgcgcctgttgctttagcctttagggcatgtaaagcttctccacgtccccactgagcattatcttcacaagtctgaaatgatacacacgagagcgtgtgcatttgtgtgtagcgtaaacacacaagagcctttgcctgcagatgggagggtgaacacacaagcatccctgggcccagttctctcacagtcttggacagactaggtaagcaaggtctcttccaaagctgaggtttgatgactgagcttgcagtttctgacttttgactatgccacaaagaacaggagaatgagttgcctacatatgcagagacaaggactcaaattcccaaattcgcactcacaaggctctggtcctgccaccgtttgactaagaagggcagaagactgctgtgtgcacagatcctagagcttgaagcaagaaaaacactcagaggaatacgaatggcatttgacctcaaatgttcttatttccattcctacccttaaatttgaaggaaaattcccagggctccagattcttgggggactataaaccttcatattttcaaaagatagaggagctttatagccctagagagctctgtgctatgttttcgatggtgccttatggtcacataagtacagaatgtggtttccagaaaaggttaagcacctcaagtacagaccaagatacgaaatgccccgattagcaagcctgctgtcagatcacaaccagctgactcattcttacatttcacacctatctacttgtgctgacaatgagtatctctcccctgccctgtaggttgggttgtgctaacttggcctcagggccacaaagattctatgcttggtttggggagaagctcaccaacccatcaatgggaaaatcaagagagccgaggtgtctttctgaaggcggttttgctaaactgatcttacgaaaagaacatgggggtgggggggacacaagcagggcaatgacatgagctcccccacaatcgtctcatctgtttttaaatggactttagagcctctggctccctggagagtctctttgcctgtatgaccagaaggagactcagttcagagcagtgtcaggaacaaaaagtcctcgggctttgcctgccaggcctcagcttcaggtcctgcccacgcacctgggatggactgtaaaatggcagctgtgtcttggattcggggacagcaacacaggacaccaagttcctcacacaaggcacaaggaacaagggattccgatggctagaggtaatgcaccatcaggccccacatccaaggaagaaggcaggcgggtctgcaggactctgggaggtgacaaagaagctactaaggacaaagatcggggttcagagccattaccagggccctgcccttaccagcagagttggggtggcccatggcagctgccactgcttctgggaagtctttgctcttacaaaaagatgcccagtgagatcctcacagttaaaaaccacaccagatggggcactgggaagaggggcctcaatctcaccatctgcacaaggctgggtagactagggtcttgtgacagcccttttgggtctgaccaggacttcctattctacccctcagctcccacaggcgttcataaatgtacagggaacagctagtatttgcactggcaacaagaactctgaagggacaacaaggtcagtttggtccatctcctctggatttccatcctgattgtgggtgtgcacagagcaagtgaaacgggcagctgctggtgatgcatctcttaactgatgtacacagcaaagcggggcgccattaaaccgacgagggaactggcgacaggcagagcttttcacgaaactgtcaataaatgcatatttactgttaatcagctaacactccaatagggtccttgctgaagctgagaaagagcatgaatgtgcatcccaagcacgtgactcatctcatgggttgtcacagcaatctccatctgactgatgggggaaactgggcttcagaacgatgtcacatctcccccatggacacacatccagcaaatgacagagcccagacgtcaacctagtctgtagacccaaggtcatgctcttgcagttgggccaggctgcctaacttgaccatttcttcatgtggaaggcatggcacccagacaggctggcagtggccattccctgtcctctggcactattgtggtcccctccccatcaggtgagcccaacctgggtaagaaggcagccctgggaagctctgtcttcactcgtcactggcaacagttaccatgtgccaaccacattttacatctacttccattctgtgctttattattcctgaaaaactgcctgaaaccaatgaatggtacaaggaagaatttacataccctttatggacaaactattttagagatttttaaaaatcacacatatgaccataataaaaataaaaataataaagcaaaccctaaaaagtcatatatatatacatacttacatatggatgtaattttttttcaatgaaaacaaatctcattctagcctacactggttaatgagcagtctcttactggaggacctggcccaaagatcacattcaaaatggctgtctctgcaaaagagaaaaagtggcagagaccaaaaattgggcctgagaagctctgattttgttattgctgtcactcattttgattcttcgtttatttgttctaagaatcaaaagcactcaagctctgagggccacgcttttcctgcaatgcgcaatcattttccactttccatgacaaacagtggctgagtttaaagaccaaaagctaccaaatctcaaagcaaaatctcttagtcctccccagctcaacacagccaactggtttaccctgtagaaattaatacagagagtgccccagggaacaacccttttatgtacagagtagactttaacagccaagtaattaaaccctgaaagtaagggcttataattaaaatgcggacaaacctgaactggggcggcacaaggagggctgctataatatttttacaattcctttttatacataatgtatgatccttctgctcaagtttcctgtatgttctttgcctgtgaaataatttacattaataaataatttattaccataactcctaaagtaattatgggtttccatccaattttttttagcatatgaattgttttgttctgtccattgacttgtatttacaagacttttcctagtagcctttttaaaataattggtattgccttcgctttcttacatatgatgtgatttccaggtctcctcctcgcctgagtgctgaggaaaatggaatgtgtggtgtccattgtccctgcaatacaaatgcactgaatggctgcaattagccaagggtggtgaatggagactgcgctcactccacttgccctgtttcaccaaaaaagatcaaactagtacacgtgtgaccctgggtcccccactgcaagtgggagaagatgtggagggagccttgactgagagtccacgcgtggccccgcttctccccacacaggatgactctcagccacagcccaggcccctctttgtacccactagaaatgagagccaggagcaagggctggctccctcacccagccggctgaccagggggtgggccgcaccacggagctgccacctgacccatgtttcctgtgtcgagagcacaagaaccagtcatataaatggctctttcccagagaagctttgtagaggaaattccatttcagcaaagaaggtggactggggatgctctggaagatgagaaaggaagccaagagtcaaaacagcctccgctggcaggagccctgtggtggcggctgagctggcaccctaataaggggcactgagccctggtgcagggctggctgggcagcactcagctctaccctatctgcttctcccacccacgcttcacgctggctttgttctctcttccacactgagaagaacaaaaccacttatctgtatcaagttcctaaactggggtaggggacaagagtggggaggggcccggtatccagcttgcaatcacagggcgtgaagtgcttttaattaaaataaataaataaataaataaaaagcataggccaggcgcggtggctcatgcctgtaatcccagcactttgggaggctgaggcgggtggatcacctgaggtcaagagttcgagaccagcctgaccaacatggtgaaaccccatctctactaaaaatacaaaaattagccgggcatggtggcagacacctataattccagctactcgggaggctgaggcagaagaatcgcttgaacccaggaggcggaggttgccctgagacaagaatgcgccactgcactccagcctaggagacagagcgatactccatctcaaaaaaaaaaaaaaaaaaaaaaaaaggcattgttgtgaacactcaatttatattagttatgtgttttatctaagtgggtgcagaggaggctgagctacttgaaagggtggcattttaaaaagtgaccagggtgctgtgctccttgctctactgcacttgcccagattttctgcagaacatttgtgaaacttgaactcatactggctcccagcgaggaccctggcatgggggctcaggaggaaaaaatcctgagtcacagggccaactgtccccagctctcatgggagaattccactgatcagcaccagaacatgagtcctttatcttcaggagacaggctgggggttggtgattatgataatttggtgttttatcttcgcacagcattgtccagcgctggaagggcccaaaaccctcttgaaaagtctagccggcccctcagagtattctcttccccactgttgaaaagcaggcacgccgggcgcggtggctcacgcctgtaatcccagcactttgtgaggctgaggcaggcggatcacgaggtcaggaaatcaagaccatcctggccaacatggtgaaaccccgtctctactaaaaatacaaaaattagctgggcgtggtggcacacgcttgtaatcccagctacttaggaggctgaggcaggagaactgcttgaacctgggaggcggacgttgccgtgggccaagatcacaccactgccctccagcctggcgacagtgagactctgtctcaaaaaaaaaaaaaaaagaaaagcaggcacacctcagatgaaatctcgctgcctgggtggagtgcactcccagttcatggagcacacggaggactggagaggtaacctgagcttccactagacagagtgcacggggtaaggctcctgactgctgacacccgctccgctccagcaagcgcaggaaagggatagaggtgggagggaggatgtgtgctagtgtgtggccgtctccttaaatcctcacaacttgcaaactgaggaaacctagccgggaagatggggtggtatccccatagctcaagggcctccacatctcacgggagttggcctaagcagtgcagaattcactgttcgttgatctttctcctccaccagacagaaagctccctgagagaaggggcagggtctgattcactctatccctcaccaggtgcctgacacacagcaggtgctcaagtcatatctatgacagcaagccactgaaaatgaaaacaaactgcagtcagtgaaacacgtcagtgatgcacagccatgcaggtcagggttttcctgaattagggaggggccgaccaacagaaagatgagacccatggagagagagcagcagaggagaacaaggggactccacagacctcccaccagtacaacggctccccgcttctccctctgctgcctggcagtgccctggcactgtcccacagagcagaaggaagacaggaccctgctgaagaggagaagagcctgggacggaggcattgggacccagccagcacttcctaaagagccactctgtaaacaggagtctgcagacacagcgtagtccctcctggaaaccatggcctccccggtagaaagcaggttgctgggctctgcagcctccgatagactctcctgggccatctggactttttcccacacacctcccttctccggggcctctgccttggtctctgggcctcaagacctggccctacaagggcgactctctctgtcatcacaaacccaccagacttccaccttattataacttacacagtgcaaagactagaaatccttgaaataaagaccaacatctccacaacccagtttactggtctggcccggttgacagctaaagcctaggcagggttgaggggctgggcatgccggggcctctctctttcccagcatgacgcaggaaggaagcgcaaaggtgaggttgtcccaggaagcaggcgaggaggcaggcttctgagctatgtgtctggggccctgagggtttgctgaaagctgtaaaccaccggggaggtattcaatcctgtggggacgggcctcccaagtatgtcacatggaaaaccagggccagctgatctccctgtctccatcttcttcagtggcagcatcaagagcaccgccaggtgtcccagagccatggcaggtggttgagaagaaaacagtctcccttcgtcacccacctgagtccaactccgcttactgagggaccttgcagagggccacctcactagacctcagttctcccgtatgtgaatgatgccactggcagagccagcggggcccagcatgtaaggagcctggcacagtgctcaatctgacacatcacctcatctatggcaactgtatctgaagaagaaaaacaaaacaccgcacatggagggaggaccgagaaggaaaggcaagggagactctgaggtctgaccaaagtaacctttgaatctgaaagcccacagtcatcatcatctatcatctgagagtggtttctgagtccacgcagacgttacagaaactcatccggcaagacgtccccaaaggtgggcaaggagagccacagagagacactgagaggtcaaacaatgcccaatcatctgaagcatcaagtaatcaatggtcatcttttttaccgcctataaaaaacagtaattcacacttgcacagaaacagaagatcaaggcaatcttctctggaaggcatgtcagcaaaatgaatcaagagccttaaaaatgtccctgccctccagcctgtctattccactcctggaaactatcctagcaaatcatcacaaaggcagacaaagaattaggcacttacctagccactgttcatcacaacagcaaataaaacagcctcttgacccaacagcctagatgtagttacatcactaaagacattctgatacatttaccacccaatgcggtactgtagaccattaaaatgcatggaatgaacaattttaatgctgtgggaagatgatggtaactactccaagtgaaaaaagcaaacaaatatagttttacataattatatgttcatcgtggaatgggctatataaaaaatgctaagaacataaacatacacaaaaatatcaacagtaactctccctgggcattggggctacgagagatttttattgcatactttacactattgtgcattttctgaatgaaaaaaatcaacatgaattactttaatcatcagacagaaattctcaatgttggagttgtaaaccacacaccagtgcctgtcccttcactcaggcaccgtaggggaccaaaatagttaaaacacacagaagagtcccggggctgctctttttgaacttgtgtccagaaagtgctttgagtgtctcacctggaggactcagaccctggctggaaggactaggaggacagcttccaggatggccttgagtacttacccataattccacaagagaaaagtgtaggtccttgactcatcttctttggcgtgtgctgaaaacaaccagaaaagctattcactcttcaaatcataggaagcatgtttgcactgactctactgatcccttctaaagtcacaataaaagggtgactgtcctttgccaatgtcagatcagggaaaggaggaaaaggtattcaaagagaaaacatctgcacaaaattaggcccagattttttgtcccaagtctctagtgagttatggagtccatcgagttaatgggctttgaaaacacacagaaagccccacgacttctgacacgaggggatttttccacataagtgatgtggaggcggcccgggggcaggatggatggtaaacagtggaacaagcttccctgagctgggctgagaagagaccaagagaggaggggacctccctggggacacgaagaacctcaagtagggagcagagggccccaggtccgactccgagacccctcccttccagatccagggagaacagctctcccgctctggtgagaagcatggggagagctcggaagggctggcgtctgctctgcagactgttttgtggctacatcgagtccccttgaggcattttctctgaactgaaacagaaactcaagggttatatttggtctcaacataacagctatggcttttgaactccttggccctgtatttccacaatggtttccctttccactgcaaacattctacagcttccctgatgccccccgcctaccctcaactgaatgctatggccaccaggcagaataggccaacgaggcctagaagaaccccaaatccagggcacttgctccatggctacacagtaagctgggtgtggaatattctgggggttcctcatgctaggtgatacccaggtcaagaggctcgctcggtcctctcatgagcagagactacccagccagagccccaggaaggagctctgcctcaagtgctccaaggcttcctcactcactcgcccactcgctcagtgggcacgggctggtgattcttcctaggcgggctgtgctgggggttgatcatgcaatgatgaaaggagctcttagccccagagaaatgagcctgtcacagaaggctctgacttctaaaaggaaccctgaacactccccatatcaaaatgacacaaacagacaagacttccaggctggtaagtggacaagggcccaggttctggctctttaaggcctggcaggaggatggggctgactaggaacgcctggcccctccaggtaagaaggcggcaagcacctggcaccagctccctcacttcatccccatccacccaatccagggacctctgcacaaggtcaacgccgtgttcatcccacggggttactaagggtccatgctgaccaacctggggacacagaggtgaaggagggctcactcttcatggaagacggtcacagacaaaccacagggagatcagggctggaggggatgtccagggcaagtgtgctgggatgagggtggaggtcggggcagcctcctgggggggatgcttagacacttgatgaggaccacaggagcttctagggcggaaggggaacggggcagtcctcctacaggttgccctcctcagtttaaaatgatcctaacagtatcatcaggctcagtcaccctcctggattccacagtgatgtaaccatcccctctaccgccatctgtggaaatatctgggaagaattcaaaatggctgcacctgcttcctcccatcccccaacacaatcccagctgagaggtgcagctgagaacacaccgaagtcatccaatggcaagtggatgacaagcgcatgagagcactgctgctggggctgcactgcctgcacagctgagagctcagcctgtggacgccaggcaggcgcccagtttgcaggctcagagagggaagtcaggccagggtcttgcttgccaaggaaggcagctcccagcactaagggaacacctgggcacaaggaaattaccccctggggaaccccggcccccagcccgtgcctgccaggtgggagaaggtaacccagggtgggaggccagagaggccacaccaggatgggggctggggagagcagaattgaacaggaacactgaagcaccccgcgtgcttcactggcatgcatgcaggagggcttggggctttccacaccaaagcaggaagccacgtagtgagccgcccctgcctggccagcagaacagtgcttgctggccgcctctcaccaagctggcatgttctagaccaagggggacctcagggccctcctgacccaggccttcgcaaggaacactgccagagatgctggggtctgtctgcccacagaggcagcactgggccagcacacagagcaccccaggcactcgttcatacattcactcaacttgctcattcattcattcaatgaggacttatcagcatctgcagcaggtccccagagtggcctgccatttctaacctggaaaactgactcctcaccaccccaccattggccctgatcccagccactgccagccccagtgaacgcccctcctaaccgctcttacagcctgtaccctcggcccccattccccaccctccatccagaacccagagccatcttcttaaagcagagatcagaccacgtcattctgttccaacaacttcccaccacaaccagaatcaaatcccggccactacctctcctccacagcctacagggccccatatgagccaacctgagtacccccaaccttgctctggccctcccctcctcactcacaccacccagtggggccaggccagtcactaccatctcaggggctttgtgccgggatcttcacgcagcaggctttgcactgttcctgccctgtggcctcctcagtggccttgccggaccatcctggctaaagcggtgcctcccacctgcttttctctctcccatcgcctcatttaatgaacatggcaggtatcagaacatctgttcctgtactgattctctgctccatgggaacggaagcttcttgagaaaggagggctgtcttggttccaacatcccagctgacagcaggcaccatggctacagccacctgtcagcgccagcctgtcccactcctgcagccacacacccagtggatgtcaggcaacggaagtggattttcactgggcagaagtcactgtctcccaaaatcgctggcctcacgcaaagtcaaacctcagtggggaagggctgagaggccagcctgagtgtcagagccgccctgcaggctagcctggcctcctcatgccggtctccaacactctacctaagggttcccatgaaccagcaatggtgcacactatgattttctaactcgaaagaacgacttctccatttccccaccccgggcaagccactgcttgctcctcactgaacagatgaaaccgcgcagcccagtggtgcggcccccttcttctgtcagcagcaccccaattctgaattgggataccttcatcgtcactggatcatgtcttagtgggactgtcaaccaaggtgcctccacctcccctggccccaggctaggcccagaactcaagcctggctgaccagacactggttccatggctgactcctgaaccacagagctggggctgatccgcccaggaaggaggccctcagcctgcccgtgagcacctgcttctaaagtcctcccagctgctcccaccctgccctttctgaggcccgactggccccctcctctccagccctgcgagctcgccctgtgcttcagggagttctctttcggggtgagttagctggagatggcctctggtgctgacaaaggaggaaccctgactgatttcgtgcttgacctcaagaccagatcacggcccatcttgctttctgagccccatccgtgaggctaagccagtggcggccaggccagaatgtcatgtactgacagctttccagggtgccaggccccagtgtaccctgaccgctggcaggtttccctggtccaactccacatgggcaaaccagcagagttcctgcttggctctaggttggccagggcctttttttccccaggcttcccagtatatgctaacattcccactggtatttaccattcctatacacacggcctttccaacactttgaacctcctgcacccacagtgggaagaatgagccaatcacggtgtggaggccccaccaggccgagggaacccctcggccctctgaggtttcacaagacactcagtgtctgcactctgcgagcacccgagccctagctgaggtctgcagtgaaataagaccagagcacatttcccctttgtgcttctcccaccgtgaagcctctgttcccgagcccacgccggggcagggcctcgtctctgtgagactcctcagatcacgagagaaggtttttggaattagatcctcgtaggaaaggcaaaagctggaaatcaaatggaggcttcagggccatctgtctgactaaagaaagcagccctggcttaaataaagacacaattaaggctccaaatgaggaactggccctgcagaaaatgccaggccacaaccacggttcttggtaactttgctctgcacattatccactaaagaaatcaaatcaccttttccatctcctgacacggtgttacagggagccacagagcaacagggggaggctcgcgctcatgccctgcgggggaacgagtggagcacccacacttccgaaatgcaaccccgcgagaccgtggcagtcgaaagcaaaaaggagatccaggcctgagacaagaaagagaagctgaggagggaacagcacctttgtgtgaagactctcaaagatgcggatagagatacgctggccctgactcctgaggctctgggattagccaaagcatgggcaggccccttggtatctctgcctgcccagggtgaaaggcatcaggctgccctggaccctgtgcactcccacattctaacttcaggccagcctggggcctgccagagatcctggctggggctgttgagctcaaagtgccaacttagcatggcccgaagtatgaagaaccccagtgcccaggcaactgggtgcaaggcctgacatggccactaactcctcaggtaagaaaagtcatttagccttggcatcctaatctgacaagtacagaaggaagtgcttgttctagctaccagatcagcccctccaaaggacaagtattggttgttacgtggaaagtcaggcagcctggagctccatgctgccctctgcccaggagcagccagccaccagctccctttggtcttcagccttaagggaggatgggctgcagaaagaagagcgggcctggccaagggaggtggtcactctggaaacaaaagaacaggcccttggcctgagtgtgggcgtgcgggaaggagctgagggagcacagtgctccaaggtcaaacgtctgggctgccttccaggggagcagctaatgttagaacactggaaggaagagcccactcagcagaggaaggcactggccagagtgggggaaaggggaactggacccagccatggctgccggcagtgcaagcgaagccagggccatgggcacagctgagcctcagggccatctccccccaggcaggtgggccctgtgctgggaaaggcaaaatgctgagcactggtcagtcctttttttccctttttcccacatctttctttgagggaaagacagttgtttcaccagcatttagttttttaaaacaggggaaccagaaccatggcatgaacccctaagaaggctgggagggagaccgagtcctcacacccctcaacaggcctcagaattggccacgagctcctcctccagtgccacatgacacccagggttgcgaggaccctggtgactttcccttgcacattgagactttcccgctctgtgactaaggcctgactctggggacccagggtgagctgcgcctctggggcctgctcccataattccaaagtggcctatgctgataccagtcccggcctcccccacagtcatgctttcctttaaaatcttaaacctccacttgttatcttcttagtctgattagaaaacaaaagaaaaattattttccatcgttcctgttgttatcttgatggtatttacacggggatgatgttaccagtttaggaagctaaagcaaaaccccgtcaacttcctctgaacctttgctggctgttcaaagcaaatgctagcatcagcttatctcacattctgtcccgtggatgtcatcactagactaagattattttcagtatttcttcagttatttacatcgtgtgtctctccccaaggcctggaggggctccaaggcgatcacagcctctggaacagggcccatgcgagaaggtgctgggggaagcagacaagggcctggacttgaaatctgtgaccagggcagcccctccctgggctctctgagccacagtttccttcctgtataatggggtagaaatgggtgcacccctgcccctcagcaggtggcatgaggctcaaggacagggaggaggtacctggacctctgggcatacagtttggatgttcgtcccctccaaatctcatgttgaaatgtaacccccaatgctggaggcggggcctggtggggggtgtttgggtcatgggagcggatccctcatgaatggcttggtggcctccccatggtgatcagggagtcctcgctcttctagttcatgtgagggctggtagtttaacaggtctggcacctcctcccttccctcttgctccctctctcacctcgtgacacacttattctcccctcaccttctgccatgactggaagcttcgtgaggccttactagaaacagatgcaggtgccatacttttttttttggagacacagtctcactctgtcgcccaggctggagtgcggtagtgctgtgatatcggctcactgcaagctccgcctcccaggttcgagccattctcctgcctcagcctcccaagtagctgggactacaggcgcccgcctgccaccacactcagctaattttttgtatttttagcagagacggggcttcaccatattagccaggatggtcttgatctcctgacctcgtgatccgccctcttcagcctcccaaagtgctgggattaccggcgtgagccaccatgcctggccggtgccatacttcttatacagcctgcagaaccataagccaagtaaatctcttttctttataaattacccagcctcaggtattcctcatagcaacatgatatgaactaacacacttcccaagaccctcagtgtagctgcacctccaacaccttcctgctggcccacgctatagcgcaggcagcgctgagccaggccgggccaggcactgacgcccagtcaatgtgttctgggcgcataagcaaactgagcaatgagaaagcccatctccaacagggctgctccccacaacagacctctcatctggagccaaggggagagaagaggaggaggaagaccacagatggacccaaagcactgcacactgggtggttctgggcccggacaggccagtaacaaaaagcagcagaaagaaggatactttccaacaaagcaaggagagttcaggaagaaagcacagattctaatctgtgtggccacaagagaacacatggtagaatcccttccagcaaagccgcctgctctcccctgactgctttccctttctgagatgagttttccttccctggccagggctgggaggccgtgctcctcctggcaggggctcaggccacacctcttggaagagcagctcagctgaccttgggcccacatgtcctggaaccaactctgaagccaacaccaggcagtcccaccctgagaagggaccaagcacagaggcggccactgcagccaactgcacagctggacccgggtagggctcctccctcgggacctccagatggctcctcacccttgaggtcccttctttttggtcagagctactctagtcgcacccactcagtcgtgaactggagcagcagccagagagagagtaagacaatggtgaatgagaagaggccaggtgacaggaacctgcaagctcatccatccacaaacatccactgagcacctgccacgggctgggccccgtgcattcaacaacaagtaagagagacatcctctgctttctcaaagctcccattctagtataaggactcggtcaagatccacagggacatgtttaaaagtgctaagtgcccaagagggaaaaaggaaaagaggagagaaagtgtggtgggggtaaggggtgggcgctggcgctgggactgaactgtaggttgagtagccagagaaggaaggagggagggagtatgtcctactgtggggagagggctccaggccaaggaaaaagtgcaaaggcctgaggcaggctcacgcttggcatattggaatagggaggccagtggggaccgagcagagggggcagagtggcagagatgaggtcaaagcagtcacatggacaagaatatatggggccatgtacatcctagtaagggctgggtgtttgctaagcattcagtgtaaagccagtggaagctgctacacagagaaggacagctctgactgggattctctctggctgctgggtggagaacaggttaaaaagagccagaggcaggggaccagttaccacaagaatccttgcgagagaacagcaggtggaaccagggtggtggcagcggggctggtgagaagtaatcacatcacacagcaaatgtgaactggaaaggatggggtggtagcagaagagctgaatggtcacagcagctctactcctcgctgcagtgaccaaggctgccatcgagcaaacacacctcaggtgcctgctgtctgccctgcctcagtagtgctggggacatggggaggagcaaagctgagtccctatccttgcagctgggggtgacaccccatggagacctcacaggctgaggcccatgagcagagtggcaccagtgtcacatctggtaagggctgaagagacctgactgagggagggccaccaagactggcgtccagacaccaggcaacaggcagaggcctgaatgcaggcccaggaagtggggctagaggggcaggagggaaggcggaggcggagccagtgaggcagttactgcctgctccaggttgcagctgcctcatttgtaaaacaaggaggctggacccaacggtttctaagccacttcttctcacccttcaaggccaaatcaagtatccctgctccgcaaggctttccctggcgtgctacagccaggctggccctgctcctctacaagccctgggcttcccatgggcttcagctgcgagttcttagtcatgggatcctcaagtgtcactgtattcacagctctccagacaccctccctctagaccacgagcttctcaagggtgaggagtacagggcctggctccagctcatcctgttccctgaactcctccagcctggtgcccaacacacggaaggcgctctgtgaggcctgcggaaagaatacagatctcggtggctttcccaagctcctgccacagccagagacctaggtctatctgctcaaggtctggtttcactggcatgagctaggggaaggggcccaccaaggaggcttggcgtgggtcctcacgaggagccgtgaagggcgccaggaggggtcctgggcaaggtgaccctgggcagttggccccttcctgatcacggaagctgcagagagttctgaggacttgcccatctccacaagactgcttatgactgagtgtggcttctcgctccctccacaggggagcagcctgcactcacatctgaggaactgggcttggaaggacaggtctgctgacagggttcagctactggaggttgttttgctcgtagtctaagaaggccgagttagctacctctctgcgctagtccaccaagtggtccagggtggtccagggtgaaccacctttggcagagggtggctgttgccatagctcaccacaccttctttccccatcatctcccactctcgacgttcctgaggcagcaccacccttcagagggacaggcttatctgggcctccattcagggcaccaaccccctctggaaaccacccccccttaatgggtggagacagaaggaatgtcaatcctggcttggcaggcggcagaatcacacttgctgttatttaccaggggatggcctcccctcctcattcaccagatgacctcaaatctgagctgagttccttccttccagcaagttctcagtcaagctctgctcctgtgccctgttgccccagcccgggacgcctcacagagctttgctcttggggactctggactcgatttgctaagcttaggtgctcagtccacagccctgtctgtacatcaggcctcagaaatggtcatggaaagcaggaagcctgccaggtcctcaccagttcacggctgaaggtcccacatgcaatggagtcagctccccgggtgctgaggctttcacttaggaccatcaccatgataagggcctcaggcgctgggctccatcccagggtgggtatcagccatcttcacttgggcagacttggggtgagtacctcctggggaattgatgtcagcagaaacagctccccattggccactcacccttggggtggggcccttctgggaaatggccaaatgtggtcaactccctggaaagacaaaagaaaagcaaaaagattcaggactaagaaagacgagggccctgagagtcacccctcccacagtactggaaatcccaggggactggaaccacctctctgctaaaggagatgcactctgggagagtcaccaaggcccagagttaccttctcagagtccccccgcccacccctgccatgccagccttgggctgcctcacttgtaaaatggcctggtggatagaacaacaaattggggtccagccgcatgatacctttaagatctatctcagggtctgggtggctaacaatctgctgtccctgcagcatactcaagtcatgtgacatcttaccactaagctggctctacaggcagcttcagcacacaccaggatacattaaagtaggccaagggtcagaacatgcctcagccccgcatccaacaccaaaggggtcggccctcaggcagccaactggcagcaagggaccagcagtcagcatgctggctcccttctccaaccagttatgaacagaagctaatggaacaatcagtagggtccatttaaaaaggcatacatttggccaggcacggtggctcatgcctgtaatcccagcacttcaggaagcttaggcaggtggatcacctgaggtcaggagttcgagaccagcccggtcaacatggtgaaaccccatctctactaaaaatacaaaaaattagctgggcttggtggcgtgcacctataattgcagctacatgtaaggctgaggcaggagaatcgcttgaacctgggaggcagaggttgcagtgagccaagattgcaccacggcactccaggttggggcaacaagagtgaaactccgtccccaccccgcccccaaaaaaaggcatacatttctggtccttggaagtgccacatttcaacatcaacatctttgcaacactggaggccttcacagttttgtcatcttccccagaatgaactaaactgagcttccagcagtgatgggacccactcagcatcgccattctgcacagcctatccgcagcccctctccgataacccaccatcatttcccaccaaacaaatgaagaaagagtgcggccttcagttcaggtttgaaaaatccctccttataaactcatgtctctgattctatttccccatgtggctaaaccttcaaagaaagtcacacagatacaaggaacctgaagatcaccatcaaaaagtaaaaaataatcatgataacagtattaaatagaaaagcagcttccaatctgtaatcagaaacaaactgctcaacacaggaaaatgttttagaatctgctgctctgtgtaaaaattaattgcaccctggtatttacttgctgtccagattgtaaatcatgttttcctgtttacttcaattagactttacagtgggtgttactgaaattgctcaattacaggccagctggcaagcacaggaaaattaccttctactgttcttcgaaaacaaggttcatccaaagtgcaaaagcagggaaggggaggagggaaatcaatacatgttcaggaagggagccccggggagcctgaagattcccaggtcgcattgagagacctgatgcacaggttcaataccacatcgatctagaagtgacatgttctgaccaagtgtgatctgttcaaggaaagaatttcagaccactcctgcaagttctggccaggcagctgagccagaaatgcctgtcagcccccactgcaggcttagctcaggagcaggccagagaggtgctcctggactcgcctttcaaaggggccttttgtgcctcctcagtggtggaagcctaatggcagccgtcatgtttctgtgtgtgagccccaattcagctctacggcagccagccgtcggcacaaggcctgagaggtgagctgcctgttccctcctcccccatttccagcctctctctaggaagccaggtgggctcagtagctacagaggctcaggtcctgagtcaagcacaactgagttggaatcccagctcttgaaatacattgtttgagtggcctttgccaagttactctcagagcctcagtttccctctctgtacaacagggaaaacagtgcttgcctcacaaggttactgtatctgatgaaaacagagcccaagtcctttgcccagtgtctcgctcatccaggagagtgctcaatcagcagcagctactgctagcagtttcatgggggaggctgggagtccagatcctcctctcggcaatggacgcccaagcggccatcctctcaaatgtgtttaaagggaaacaagctaaattccattaacaagggcctggctatatgatggcccatccctctggtgaagtaggaggcggccagtagaatgaaactgtggaagtctgtcgccatgggaacacattagcccatccagacacagctctgcatgaagcaggaagccagaacgaggcaaagacggggcaccccagctctctctagctccatccccagcagagtcccgacaaggggccagggctcagagaggcagcagaagcaccaaaagcgcctgggtaactgggtggtcagcacacgtggcaggcatggaaaggagaaggcaggtgtagcacaatccctgccctggggggtctcacagagagtgcagtgacccagccaacacatttcagaggcaggcagaaagggggacattcatcggaggtaggccttaaagtgactcctttgcaccgtaagagcccaagagtggggacaacctagctgcctacaagcagggcaaactggttaaatacattacggtgttgttacataagggaataccatgtggccttcaaaaatattttaatgagccagttcaaactgtacagatatgaaacaatctccaagaaatcctataaagtgacaaaggcaagaagagcgagtccactagcctgagtgacagagtgagtctctgcctcaaaaaaagaaaaaaaaaaaaaaatagaaggagtccagcatggtcccacacagtggttgcctggagaagggaatgacagttccggagaggaaccacgtccaaccctatgtgaggtttgaatattccatcccacgcctgcccatggtacttttagttcttaaaaaacaggcaagatttcatcaggaagggcagggcacccaggcagagggaagggtgtaagcaaggcgtggccgccgggtcggacttggagtatgggaacggtgagcgtgctggtggctggcacacagggcacgcagagggcacagcagcaggatgggagctagagagagactcaaaccagacccagggctctgaatgccatactcaatggagaccttatcactgcagctgtgggggctcccaaaggaggttagaagctggagctggctgctttgatctgttgggagagcaattttttctgaaccctttgcaacacctaccacgatccctcacataccctagcagctcaatacacatttccagaatccagctaaattacagcaacatgtgaaatgatctgggcacgttctcagaatttgtgaggcgaatccagaccagcagagcccagcacgatctggaatttcctgggattcctatgacccgtgggccctggcccggccaacttcactggggaatgccaggaccaggccggagacttcgagcccagtctgcaaacagggtcagggtcttctcaaagagaagccgggggcatggccaagaaaaagacaataactgggtgatcccacagggcgcgaggtggaagcctcgcaaagccctcccacaggccacctctggggcacacaccctgccatggtctagtgggttttctcttaacctatatcaagaatcacttctatctactgagcacctactaggtaccaggcgctttacacacattagccacaagccagattgaattatccccattttacagccatatacagcaactcacccagggtccgggttcaaagctgggatttgaaccctggtgggccagcattcaggactgcacttcccaccatgcctcacctctccatcccctaaaaaaccccttcaaatgcccattcaaacaactaccagcaagagttctccttagcatttattccagagagattaagatttatgttcacacacaaatgtttgtaacagccctttattcataacagccaaaaccaggaaatactccacagacgctttgctgggtgaacaattagacaaaatgtggcagggcacagccacactgtggaatactactcggcaataagaaggaaccaaccagagacacacgccacaacctggatgagcctccagagactcatgcagagtgaaagagccagtccccaaaggctcactattctaggagtccatttatatccctttcttaaaatggcaaaattatagaattagtgaagagatgaatggctgtcaggggttggggatggggcgtgggagcaggagggaaatgggcgtggctatgaaaagacagcgggagggatccttggagacagacatgttctgtgtcttgactgtatccgtgacaattttctgcttgtgatgctgcattagtttggtaggatttaccattaggggacagcgagtaagggatatgcgagatttctctgtattatttcctgtaactgcatgagtgtaaatgatctcaaaaaaaaaattttaaataaatcccaatctatgcatttatcaaaattcatagcactaaccaccaaaagagtgtattatgctatatataagtttttaaaactttttttaaagcccactgattataccagggagaccgtgtgcgcgggaaggggaggaacgtgtgtgtggaatttagcggccctggccttcgccatgaaatcactcgacttcagtttcctcatctttaaaatggggctgaggctggtcacagtggctcgcaccagtgatcccagcatttgagaggttgaggcaaaaggactgcttgagaccaggagttcaagaccagcctaggcaacacagcaagactccatctctacaaaaaataaaaactaaaaaaaaaaaatagccaggcgtgggagtgtatgcctgtagtcgcaggtactcagaagtctgaggcaagatggcttgagcccaggagtttgaagttgaaatgagctatgatcatgctactgcactccagcctggtgatagagggagaccttatatcaaaagaaataattaagctgggtgcagtgggtcatgcctgtaatcccagcactacgggagactgacgtcagtggatcacttgaagtcaggagttcaagaccagcctggccaacacggtgaaaccccaactctactaaaaaatgcaaaaattagcttggcatggtggtgcatgcctgtgatcccagctactcaggaggctgaggcgcaggaaacacttgaacctgggagacagaggctgcagtgagccgagattacaccactgtactccagcctgggccacagagcaataccctgtctcaaaaaataattattattattaagtaattaaacacaatgaggataatacctttgccctggggctgctgtaagatttaaataagaaaacacatataaaaaagctcggcacagagaaggccaggcattggtgtccattcccctttgcacaagtagcaatcgtgggccgcactctcatcgggcaccatccttgcatctcggctgcagttttccttgccctgtatttaagtcttgtattgtcacttcccagtccccacattcacctcccacctctctcccgtgactccctgggcagtgctcatgatagtgggcctccagcctgcttccatacacagctagggctacccaatatctgccaaaggagggctaggtgagggtctccccttggctggcaccccaacctgatcatggagacacagtgctctctgactcaaccccaggagcccctactcaatgactcatcttcaccaggatttccactgaaaagagcaaaaggcaaggtcagacttcccattgatccatgtttatgctccctgggtgcagacacggtggcagggggcccctgcccacctcccaagtcctcaccccaagagtgcatctgcccaagaacggccccaaacttgccagcattgtgcccaaagcaaggcctatgggtgggagggcacacacacaggtggctgctgccgtggtcagcaagacgccccatgcccagagcccatctccacccccatgtgccccacacagccacacttccagccacagccctccaccctcacctccattcccatctccctgggcatccaccagaggctgggtccttctcagctaatcctctcacgttcctatgaacaggcattatggttggtagtatgcacattttccagatgggaagactgaggctccaagaaaagaaatcaagtcatttgcccaatatcatacatctagcaggggcaagaccaggattcaaacccaggccttcctccccaggccactctgtctctgacaccacagaaacaggggggacagctttgctctcacacaaggccttgctaacatgaaattttcttgcttttgttctacagtcttcaatgtgtcttcatttgtttgcaaccgctgaacacagctatctgatatcactgtggcctgggactctcagcttccagcaagtgggagccccacctggctcatccacttcaaaagaggattgcatgctaatgaattaatacatacaagaaagtgttgcaaactctacaatcctatataaatcttaagaagattagaagtttaccaaatgctctgtaatgcattttgaagggctatcccttaaaagaaactggaaatcagcaagacaagcttttccttcttttagtgtctttatttagcctgtacgtactacttgcacacattagtttcacagttaattttaccgccttaaaaacaggactcagatcaaaacctaaacatgagaactcagccactgacagtgattttcctggtggctcccggaagtcattgctctcagagcttccatttccccctcccattaagcaaaggaaataggaggggaagacagcaattccacaaggtctttgtgcactttgaaactttcgtagcttcagttgttggtgtgacaaaagcaatctgtgggcagaatccagaagcaagtatatgaacatttggggaagggtgttgcttagtgggtcacgttgtctcctgccaaattctgtgacaaccctaaagtgcgagaagggttccgaggggagccgaatgctgcagtcaagcttcatatccgccaagacaaagggatttaatctgcttggggacgcttctgcttgctgattttatatactaactaagtcatctgagtctaaaggataaaagttgaaagctgcctaagaactttatccagggcctctactttcccagaccaagttgatactggaaagagagtctggtgtttcaaccagagttcaggacccacgaatgtgcagcttctatactatagtgaacatttcaacgactcccacagccagggttcccatgtcttcaggtcctgctgagaaacaactaacaatcctgccagcaccaccctcaacacacagaaaaaaagaggcaaagaaaacctcttgccgggcgtggtggctcacgcctgtaatcccagcactttgggaggctgaggcaggcggatcacaaggtcaggagatcgagaccatcctggctaacacggtgaaacccctctctactaaaaatacaaagaattagccgggtgtggtggcgcacgcctgtagtcccagctactcgggaggctgaggcaggagaatggcgggaacccgggaggcagagcttgcagtgagccaagatcgtgccactgcactccagcctgggtgacagagcgagactccacctcaaaaaaaaaaaaaaaaaaaaagaaaacctctttcatcagtactttgctagtgcagaagtaacaggtgacacagagcctaccttttaaagcagcatgaggaaaatattagccaaagcaacagtgccaggccctgtgcttactgcaacctcagagtatccctatcagagggtactactgttatcccattttacagagggggaaagtgaggcccaggtctaaggtcacctagttgtgaacaaggcacaaagactcaacccacatctacagaactccaaagtctgtcttaacccctggaccccactactccaagacctgtaagtttcattgttaattatcctttaagtacttgatttgtcagctaaatgatcaaatgccaaagcagacactaattttgcaatacacacactctctaatacagcccatcctgaggtgtcccagccaaacatcaaccttctggaactgatgttgaaacatggtattaggggttccactgtaagcaagaaaaatgggcagatgacgagtatcttggagagggtagaagcgggacaggaagccatcactttccctccttaactgcatggatgtgcagacatggtgggtaacctgcagagggtgaagtgtcttccaggaagctcagggtgctcctgggcctgcagggagtcacaatggcttcttgcaaccccagctggaacctgtatccatctgtccctatctcctcaggtcctgtgcctcctgcctatgcctcccccactgccaccctgtccttctctcaaagttcatttccaggttgtttgtggggagccccccctccacgtgtgcagcctaggtgttgccctccctcagtcatcctgtggcctcagcacagagcctgcccacggcagcaacctgactgatgtctatctgctaagtcagtatcacagcaagagcactgaacttgagtccacgctcagcccagctcagtcccagaggagctgcagggccctggctaagctctgcaactttgctcagctttctgcctttgtaacatgtaagacgttacccttgtgctgcccgcctcagctataagttaaggaggtaacgccctgtaggtgggggcactacaaaaatatccctagaaacactgaaatccctaggtaggcacaattcctagcagggcataggcccttattaaatgctcataaattggataaaagcatctcgtcttcacagctacagcattagcttctaggggccaagaatatgtttttgagtcctccaagcaccttgctcctgcaactgggctggtggacattcagcagggcaagtgagagtggctggctgtacgcatgaagcacctgctgtccttagacagagagggcatactcaccccttcctcatccctccctccacaggaaggtgtgtcctcagaggtgctttcttcagtaactggggctaaaacatattccctgatctagtccttcaggtaatcaaaggccaccgaaggccacacttggggaaggactgggagtcacactacacagcttgaaagagacttgacctgggcccctggctgaacaaagtggcccaggctcgcctatgtgtctccttaatggaagggggaaaaacaaaacaagacaaaacagtaaactgagctgctgaaccaaatcggaactctgttctcctggacttttcaatgttgtagggattttctgctttttaaagcaaataacatttcaagaggagggggaggaatgacattattcagggacataaaagtgctgggatccaaaaagccaaaacaaatctcaacatgggaatgagacagcccatgttgtttcttgaaactgaagccaactgcatgcatgacttgtcaagagtccatttatcaatgaaaaataactgatggacgagcttcctataggcactcccataattctcacgaccgctcatgtccttttaacccacaaacactatgaaagaagagcttgctatagactggaagctgcttgacacactcaaaaggaaggagacgagggacaagaggcacggagagaggagaactcacacttaccgagtggccacagagctagatgccgccttctgctccaaaccgggggaagggaaagaatgggaagagaaccagaggacaatgaggggaccgcagcgggccccaaagataatctactatcatgttaagccacttagcctaagacaaccatgacctgttcttcagtcggacctatttataagtatactgaatttactcaaaccatgactaaaaaccaacagaagaggggtggaaaaaaaagatttaaaaacaaaaatggaaagacccaaacaaaaggctgtgtggcctaggtggatcaagcaggacttaggggatgggggctctgggcttgacagtgccacttactggctctgcccagtttgccaagttatttccctcctcggagcctcagttccctcatgagtcaaataggatgctgggccagataagctccgtttctgactagtgagactctaactgtagtcacgtatcagctgtgtggcttcagccaggtctttatgactctctgggcctcagtttcctcacgtgtcacaggcaaatggcaactctggagagagcatgaaaatcaatagatttgaaggtactgaatgaactataagaaaggacagtaagctgatgatgcctgtcctggaacaactgctatgctggcctttccagtcctactcagacctgacctgcagttcaaggtcccaggaaactggacaaaggcaaaggccaaatccttacttgctgccatcaaagtgccctggctatgacctcccataaagcagagtcggagcaggccacagggactcttccaatgggtgggaccgaggtagcggggaggtggtgttgcagaacctgcccctctcttacatatccatggggtgaggatggggatgtatgcgtgattgcattttccaagctcaatccttatgcatacaggggcatcttggtgtctttcagtgacgctaacaacaacctgatttagaggagtttcttggagagccaggaagttagccagtgaccagttttgacatcttcatcttctaggacaactctcaggacaagaatctccttttcctttacaaaatgtttatgagctctcggactctccctctcctgcaggacaatccacccccagcccaggctacagacacagctttcctaccggtgcagctccagtcactcagcaggcagggagaagcattcctgttggtgtctacagctctcacagaacccccaaagacactgcacagagggaaggtaatctctcagcagctgggccttggaacacagctgcgagggcagtgatctctttatctaggaggcctgcaggctggtagccccaacacaccggtctaagactatatcacactgggacatgacaggtgatgcaagaaggtcccaacaagctctgtaagaactgctataggcacgagaggcaccaggttgcccatgtgccacccactcatcagaggtcacatcctaacctcagctcacacttcaggacttcccccttcctgatctgactgagtcatatctaccaacctacagggtctgttgtagaaattaatcagacaggctcatcaatcacatggtaagccttccgccttctcccttctacccccacatcgcgctgcaagctccaccacacattcgagaatgccatcatctgccaaaacaaaactggagggactctaagctgccaggcgggtctgtcacatgacaagtatacccgagctctgtggcacctctcaggtcaaacagccaaagctatctacctgactcctactgcaggggagggttctggagggcaggataaattctagtaagactactcccaccaccagccacagcacaatggcgggggagccgctgcatgtgtaacaacagccatctgtctattcacagatcaaaatagcaccagattcttgcctcttaaggcagagaaagagatttctgcaaagaagggcttcaccgccaggcgcagtggctcacgcctataatccctgcacttgggcaggctgacgcaggtgaaatgcttgagcccaagagttcaagaccagctgggcaacatggagaaatccccatctctataaaaaatttaaaaaatagccaggtatggtggcatacacctgtggtcccagctacacaggaggctgagtagggagccaggaaggtcaaggctgcagtgagctatgatagcaacacttcactacagcttaagtgacagagaaagatcctgtctcacaaaaaaaataaaaaaaaagaagaagaagaaagaaggaagaagacgaagaaaggcttcatgaagtcctaattcaaagctaagtccaggcatttggctttaaattacttagaactggccacggaattaatctaagaagtttggaggaacagctgctcaacgggtcttgagctccttctttattttttggcatgccatgggggtgggggaacaggagaagaaaggggcacctcatttgcaaacacttgccccacttccttctaagcactctggatatgacaatcaggcctcctgacttagggcaaagacctgggtggaggggtgttaaagaggaaatgacacagccaaccagagtcacccggctttaaagcaaacaccttgggatgccaaggtgaactcttctcggcttttcgttacagatctaagcgagagtcaaaagactctggaagagttaacccaacttccaaaaatgagtaatcatcttcctcgttagaaatggcccaggctccagaaacaaagattcattctattgtttgtccgcagcacaccccaaaatgcttgaaagactgccaagtacaccagctgcggctatagctgtcactgtccccctagtggagccatctgaaccaggcttggttgtacttcccttgctctcaggaagctcattcactaagtcagcagcaaaactctaaagccaggcctctgagcactcctccatgcacctcccaaaccaaatgtggactggccttcacctcgctgtggaaaggggttcttccccagtgtcatctggatggagttcaaaaatgtgcaggagaaggaaaagttacacatcaaaaaaccaacacggccgggcacagtggctcacgcctgtaatcccagcactttgggaggccaaggcaggcagatcacctgaggtaaggagttcgagaccagcctggccaatatggtgaaaccctgtctctactaaaaatacaaaaattagcagggtgtggtggcgggcgcctgtaatcccagctacttgggaggctgaggcaggagaattgcttgaacctgggaggtggaggttgcagtgagccgagatcgcgccattgcactccagcctgggtgacaaaagagagacttcatctaaaaaaaaaaaaaaaaacaaacaaaccaccaacactggccacctcgatcaggagcagacccaagggaggtggcatagatatgttctcagacttaaaaataataataataccagcctaggcaatatagtgagacctcgtcttgacaaaaaataaattagccaggcatggtggcatgtgcctgcagccccagatactcaggaggcggaagcaagagaatcacttaggcaagccaaggctgcagtcagccatgatcacaccactgcctccagcctgggcaataaagtgaggtcctagcttcgaaaataatttttttttaagtcataaaatgtaaaaacaaaaaaagaaaccctatccgactgaataactggatgggatcagaattgatgaaatttaacaagtactggtcagaggttgacattgaagcaccaaaacccagtttccagtgtgctggatgaacagttaacagcatgccaccagtcctgacaaaagcctgcgtggcaggcaactgtactcattcattcaacaaacccttactgagtgactactttgtgactgctgggatgatggtaggggctgaagacatgaacatacataagccacagtcccctcccatggaagtgaaaactattaacaactgatggatgagtgaaataaaaactaaattaaaatgcactaaaaggcagagggtattattaaaatatcttgataaaaatagcatgataaaataactgggaccgctaaagttcagaaatctgggccgggtgcggtggctcacacctgtcatcccagcactttgggaggccaagacgggcggatggcttgagctcaggagttcaaaaccagcctgggaaacatggcaaaatcccatctctaccaaaaatacaaaaaaattagctgggcatggtggtgcatgcctgtggacccagctactcgggaggttggggtgggaagatcgcttgagtccgagaagcggaggttgcagtgagtctggatcatgccgctgcagtccagcctgggggacagagtaagaatccatctcaaaaaataaagttcagaaatctgcatcacaaccttcatgggatgggtgcaaagtcaccctgcagtctctccctcccacatcctggcaggtcccctgcctggacagactcttactcgcttcaattattaataaatcaacaaactactgactagaactgtgatgttcacgaggcccaagtctagcaagtgccggaggtggcatccacatccacaaggccccagcaaacaaggctggcagagccgcactgcaggcttcagttctagctgaccttgtcctgcagggtatggcctgaaggtcacagtctgtaagggagtctccccaagcgacgccaaccacacccctgggcgaaccttgcttccagagaccacactgggccaggtctccttttgcagagcttacttatgggagacagtaaaggagtaagacagcttcctcaagactcagcagaatccaacttaaagtcacttgcctttcacaagggggaacaagtcaacctctagagagatgagcgtaaaacataacctgcctgtgtcctcgtgcggttctatcctccttactcactctccctgtgaacacgtgtgtgagtgccaaatcagcctgccctgcagactgtcctactcatgagcaaaatagtacatatcgtatcgttaggcacagccaagatgggaagtggcctaaccgcctaacaggaaggacaggataaatacacactgcaacaccatgcaaaggacgaaacgcagctttctaagaggctacgagaatatgtggaagcttaaaaaattttgatctcatagaagtaaaaagcagaacagaggagactagaggctgggaagggtagggggaaggcggggaacaggaagagatttgttaaaggatacaaaattacagccagatagaaggagtacgttctagtgttctatagcactgtaggatgactagagttaacaatattatgtagtttcaaatagttagaagaaagatattgaacactcctgacacaaagaaatgataaacgtttgagatgttggaaatgctaatcaccctgagccgatcatcatacattatatgtgttgcaacatcactatgtaccccataaataagtacaattatgtgtcaatttaaattttaattttaaaaattaaaaaaaagaaggctttgggagcccaacacatccaaagaggaaaccatcttcaggtatagtgctaagtagaaaagcaaagatcagaacagtgggtatattaagctcccatttgggtgaaactaaataaataattgtgccaataatacagaagtcctggaaggatacaaaggaaacttaacataaaacctgtcttcagggagcggaaatgggtagccgggaacagagatgagagaagactcttcaagaaatggctttttgtatgttttcaattttgaaccaaacgagatattgactttcacaagaaataggtaatactttctaaaatcaaaaatataaaaaatactgtatttttatacacacatttgtgtgtgtatatatctgcatattcttgcacatgcatatggaatatctctgggaggacaaacaagaaaatgacaacaggagctccccccaggaaggagggagacgtgtagctggggacagggatgaggaaactgcttttcactgctgagtttgtacacatgcatgtactgcctattcttaaaacattctggagttctccaaataccacatgcagtttcctgcctccagacctctgctcatgctggtctctcaggctagaacttgccacccacttcccctgctccctgctgccctctcagcctccagactctctaacctcatcttttagactcagctcaggtgtcaccacctccaggaagacctccacactccacactgagtcaggtcacgccctctgcctctgtgcagaatgcagagcttgaatcacagggccatgaaatgaaccagcaagctgccacccctacagactgtgtgcttctggagggcatgagcccagcctcagtcccctgagtccccagaacctggcacaaagagctgctcaggaaatgtctgctgaaacaaagaacacaatcaccacgttaagtcaagtctcaacattcttggtgccagagatactgaaatctgtcttgcttgcagggggtttccgatagctatcaaaatgttgttaacactaattcaaagcacagcacctcctgattcacggaggggctgggctcaaaagttttctgggttccacagtagcagagcataacagaaaaacacagtgaccagcacaaaaacccctgtatctgatcatactcacacctcctcaggaacctgaaaacactcatcagagtttctgtgggcgggagggtggccagcagccctctcacacccaatcatgggaaaactgagagcccagggccctgccctaacagctttgttttctgtgttctgcttttaggaggaagagtcttgctgcagtcagggcctgatgtgaggcgggcagcacttgcagggccggccctgggccaggcagagcctggacagcccaggcctctgcaggaaccccagtgggacagggagggccaaggtcctgggagcctccacagagagcaaaatgggtcaatgggaagattatatacacatgtgacgctgcgctccttagaacagacttttactcagaaacaaaaagtatttctaggtgactgtagttgaaccggcaaatctcatgtactccctgtgttgtgcttctctctgggcattatttcctcccggtatcagtctcgtcccaagtccaacacgcactaggctggctgtgctagggactgagggaagaaggcaggtgatacataactaagttcacgcaaacagcaagtgttcaattaggtttcccacaaggcatagtgtgtcatacgataataaatccacaagggcagagaagtgagcctggaattccaagtagggaggtaaagatctggggagatttcctagaggaagcggcatgagtgttgggcaggagttcaatgccagagatggggtgagggtattctattaggatgctgctaaatgacatgtctgacactccagcaagctagggggacggggctgggagtggagggccccttcccagcttttggtggaaggagcctcaggatgcccagacaggtcagctgccacaacatcggccagtgccagcgccagcgccctcacaaggcccaggcagggggagctctgcgcaccggacagccacaagccgccaccctgctctctgcctcccatcactctgcttctctccacctctcagaggtctgccctcccagagctgtcctgcctgaatagcaggcaaacaagctgagctatgggggcggggtaggggggcacaggctggtggtttactcagctgaacaaagccaggtgacccaggggattctaagaggtcgtcccaaacctccctcttttgtaaatggcagcataaaggtaggaagctgcaaaacggttatttccatcccccaatataccaacagccccagccgtgacccaagcagctcgcccagaatgcccacagacaatacagtaattgtgttctcccttggggaatgggagtggccacacacagccccatacgagaatgtcacgatcatctcagactcccgagttacaaatatgtgatcaaggcatgtgctgggcacgcgcttcccacgtgttttcgtggatatgaaagcacaagggccaatgtgcccagctgctgggggctgggagctgcagaaggcagagtactgggacaaggagaaaaccacacagaaacgctccattcaaagccatgactgagttagtgtccccttgtttctgaggagcgagagtagaagggggaacactccttgacaaaacaaaactgtgaggaaaacttcaaggccaggcaaagccaaagcctgcccgtcacctcccagtgactacatctggagctaaagacacaagacccagcagtgatttcaggttcactctggacaactaaaacccccaaatgagaggaaaccaccactaagcacttagatgtgagcatggctgactgtatggacttcaacgcaccatttcctggctctgcacctgcttccccagatgggtcccagggtctctcacctccagcagccccggctgggctcaggtgtcatcagggaagggaaagaaagggtacagcagttgattctggacatggttaagcactctatttcccaccactgcacggagacactgatttcagggcacctgaaacaaagggcgcccagccttggactgacggcagtgagtgggaagcttcatgaagcattcccgagtacagggtaacctgctgtgtccatgacagctctgtcagctcgacccaaatgcggcctgtctttggtgagaacgggtaaaatcaacctatctgggaaaccaaaagctcaaaactcaaaatcgccaaggctgcctccgttagtatctgggttccaggtggagggtggaaaccgagatggacagtggatggtgtgtgttagtgatagaattacctaaaggtaggaaataaatgtgtctccaactatcacggtgagagtgtgaggacagcttccatgaagatggctgaacggaaaacaaaacatctccgggaatctagtctcaagtttcccagaaaataagatgcagtgggaaaatgaaaggaaagacgagcctcatatgccaggcagccaagacccacacaggccaacccacatccttgctggggggaacactggggtacctggcacctgcttcagcaatgtgcactggttctccaagcgtggacccggatcagtagagaattgcctgagaactcattaggaaggcaaagtttcagtccccgaccccagacaaactgcatgagggtgggacccagcagctgtgtctagtaagccctccaggttgagtccggtggttcctaaagtttgaaaaacacatttttagtggatttggtacctagaaccctagtaactgggaggacaattttgcacatgagaaaatcaggatccataaaagttgagtttcttgcaaaagccatgaggtcagaattggatgggtggcctactacccacccccagcatgtcctctggccaggccctggaaatctaaatctaggtcaagatgatccttggccttcaggagctccaacagtccctagaatgcactgaaggagaacagtggcatcgtcagagccttggcctagcagaatcagaggctgaaccaaccacccaggtgcacaatgccctgaccagtaggtgagaaagaggcagatgaggatgccatgtttctgctgcaaaggaaaggcatgggaagggctttcaggcaatggattgacaagctacatttctcaaattcagcaaaccatttggaatgacactaagaatcccaaaggttgactatgcggtgaaatacgtgtgagaatcagaaggaaacaaaaagtcacagaacagctgccatacgaagagataaaaacagggttgagtgaaaaagataaatgataggagggattgctattagatatttgaagaaatacgaagagaacacctcaattctttgaaaaatactaattaccatctggcaaatctttgctttacttctacttgctgtattgagtctctgtcaaaagaaagagctgagatacatgtttcatctaccctaagaaatttccgtctaacaccagaagttatctacttggtacacagcagctaggctgcctgtcatgagaatttaaaaattacatctttatttgtaaaaattcccttgcaatatctattaaaatccagaaggcactttttatttatttagttacttatttatatttggagacagggtctcactctgtcacccaggctggagtgcagtggcacgatcttggctcactgcaacgtccgcctcccaggctcaagcgatcctcccgtctcagcctcccagttgctgggaccacaggtgcatgccataacacccggctaatttttgtatttttagtagagatgggttttctctacgttgactaggctggtctcaaactcctgggctcaagcgatctgcctgcctcagcctcaggaaggcacttgtagataagaagattacactaggtgaagcacctgagtgattgtggggggggggggggtgcgggggtacaaaatgaatccccaggtcacccagtatcacagggccattcacagggtagaagggcccctggcctgagactagcttccaagatttaagggacatatttgtactttcagagtttttattagtgcccggagtactggcttatctttgcaagtttactagcaggtggaacacgaggtagcaggattatgatggcaatgaccttgagcactgcaaacatcctgggcatttctactagtcactgccattcaccatcgttctccctgtgccaataacctggagagccagaaaatctgaatctgccttcccaatgtcttatccactccagggatctcaaactcaaatgccttccagggccaagcaggaaacacaaatgagagaagcatgctgcataggaaccgagatgatgtgcagagaacatgcctggcccaccgtggacggctctggctacagctaactgtggtgggctgtttgggaaagaagatccaggctactattaaaatttacctcctgacttgttaagagaaactgaaagtcaggacttctttgcacaatctcctttttatgttcccaagaaatttaaaaacttgtaaagcatcatatgagacaaacaaatcatgtctgaggaccacatctggcccccagacccagaccaccagagtgcaaactccagtctaaatgatgctgacgattcagacccctgaaaacactcaaacgactaagtttcatcttggtttgaagatctccatggactcgcttggcttcgcgatccagtcacacattctcatcggcaccactccctggctcactcggtgagttagctggaggcctgaaaatgcctagacagctcagactgtgtgaaattccatgcacaacaaagcagacccatacaactcccaatcacagacaggagaggcctgccttcccacccatggacttggagagacagttgatctggttcgttcactcagcctggccccatgggaggctgtggcacccattctatggaggaaaccgtggcattatctgaagtacagcagagcctggggtctgccctgcccccaccaggagagctcccttctggcctcgcccacgaggtggggtagggaaagagtttccatgccaaatacttctaacacacgcaagtaaacccagcagatggaagagacaattctggatccctgacgcctccagactgctggctttggttgggtcatcatgaagagaacagctgcttcctcaatcacgactaccgcacagaacagaggattctgttttgatgacttctatgcaagatatagaaacaagaggggagtttcctgccttttatttcaaaatagcccaggacaaacgaagacttcttgtaccataacaacacattcaaagggaaagcttgatggagttggttttcttaaatgtcaccccacagtgagcaacctacttctctgcccacaggcagtgataaaaatgtcatcagggaacccatgcagaggagcaagagatttctctttgaaacagcaacatgtgcacaattggggacaaaactaggtggtgaggagaaactggctttggagcagagggacctggattttcaagccaggctctagcccatcacaagccacactctctcagggacatggctgaagctcagctcctgcccagcggggctagtcacccccagctggctgtgcaatgagcagacgatgagagaacatatgcagagtgcttggcacacagtaggtgctcagaaaacgccagcactctaaaaacagataatttccattataaaggtatttgtgcccgggttcttttgggcacatgcaattagtctccctgagggctgggacagcagtgagaaacttagggcagagcctaatctcgaatgatctcacccctccactggctgaagaaggaagacacaggacaccattccaggagtggctggctagaggcaagcacagtgtcaaaggtggcagtgggatgggagggggacacgtaatcaaggctggcctttcaaggctattcttttcccttttaaagcatgtggggaaaaaattttccacgtacgacctcttaaacacaacttcctccttaccaggcacttccttcatgcaactattctagagctaagttcatcaggcttacttatctggttttcttcttttttcactcttgcccaaggtcctgaaaagtcctcctggtatgtcattcttgcattttataaaggtttccatcctgattacagagggagtgggcattgtttaaggtgtgaagatttgtgcagactgtaaccatgtaaaccaaacatggaaaagccagccattcctaacaggagcaatggactggactcctgactgtacaatgcatttcagagactccaatgtagacagcgtggactacaaccagccacacagctcttctccacactcagagtctatcagcatgcacaaatgtgggggagatgggtccagcactgatgcatttatgcctgggtctgatgaactggagatctacgccctccatatttgccttcacccctcagaatgactctgcccctagttagcttccaaagagattcctattcagagcatttatggaccaagcaagacaagagctacagttcagcccaattccaagctactcaacacacggcatcagtgttggcagtggacagcattttaaggagtaagtcacgtgatactagctagctgaggtacctggaactcaccttccttcctcatgccacacagtagccatcattttgaatgaatgaagtagttctttatctgatgcccatggaaaacatggtcatttcatcagaccatgtatttcccattccagcatggtaggaacaatggtataacccatcaggcccaaatggcccagaacagaacaggtatgaatacataaaaatgggatttctgcaggacccagcatgcaaacacacatggggcactggacatggcagagttgatgaggccaacggccccagtgaaccaggagctgaggttacaggctgcagaggggcatggtgggggcctgccaatggtcataggatttagggacagcctcttcactccaggcccaggttccctctgccacagcagacatttctccatcacttcagagtcaacaaactaattttcaattctgtgttttgggagcaggaaggtccagtgtcttttctttcagcagaatacctcctctgcacttttggttctcccagatttggattctccccacactgggacacagtctcgtgtgctcctacctgatggaacactctgcaatgacagcaacgttctgggtctgtgctgtccaacgtgagaggtgaccaccgcatgcagctattaagcatgtgacacgtggctagtgcaaccaaagaactgaagtcttcgtttcatttagatttaatttaaattgccacatgaggctacagctaacatactgaacagcccaggtccggagtgcagagtattcatgtggagaagaggtcagcacatttttttttctgtaaagggccaggcaataaatattttaggctttgtagaccctgtggtctataaattctgctgctgtggtgtgaaggtagccacagacattacctacacaaacggatgtggctgtgtcccaataaaactttatttacaaatgtaggcagtgggccagatttagtcaccaggctatagtttgccaatcctaaagttgggagttcaaacgccagaactactgcccatgagctaaatgaccttgggcactttacctcacagaaccctatattcttcatctataaaaagggaataataacagcactcacttctcagggtggttatatgaattaacggcgaagcctaacgcacagtggcattcaaaaagtacttgttgggtgaatgaaaacgggaaagaactgggtgcttggactcgcactatcctgtttattcctcctgctctgttaagtaggcactattattcccagtccacagatgagaaaatcacagctcagagaagtgaagtggctgaaccgaagtcaaaagccatcaagtggcagcactagaacccagggatccttttcactggttctgtgccctactctttcttctctcaggcttttctaactgacatcagccctacccaacattctgcccaactgtctgggctcatctgtactgccttgtactataagaggctccatttataaaggaaattattaagacacacaaaatcaaccttttttttttttttaaggaatctaagacgttgagctctactagttcctgttccagacactgttctggagcccatcccaccacctactggtggggttccacttcactggaacacctctcacaaggcggctcccttctagcgtgcgggattccagtgaggtgtggcatgctagactgccacatgaagttttggctgtggcccttccccgcatcacctccaaaactgtaaaatgcttccccgaccttggagacggggaccagagagatgctccctgcagttcttcccagaggtgtgggggccttcacatgggctgacgcagctcaaacatgaactgaacgatggcttgtttcttcctgcatttggcatgaagacccagctccctcccaagtcttctccctatctcctcctgcctatctcctcctccatgtctgccaggatcagccctgagcagaggagagggcaacctgggattgctgtcttctcttccagggccctaagacaccagtggctgtgaccaccatgctggctccagtagcaatcagggggtaggacaaaaattgagccaaagctaaatcagagatgagcagccagccacacagggaacaagtgcctgggctccagctctcgcctgtgcctacactcagggctaaaaattcagccctgtctccaacagcgcccaaagcctggccaggccaatggctgcctcccataagggattctaccctggttcccccaggttccactatccacccagaaaccgggcaggatcagccacgctcagtcgtcgtcttacaagtgcaggggaagggcttggccaggcaggaagctggcagacccagggagctcctcaggtgagcagacggacaccaccctggccacgctcctccatggcagaggagcacgccaccacgccatgtctcagaacaatgacttcctgaaatcatgtgtaacatataaggactcacctgaacctcacacatgcttttaaaaattgttttttggccaggggcagtggctcacacctgtaatcccagcactttgggaggcccaggcgggggcatcacctgaggtccggagttcaagaccagtctggccaacatggtgaaaccccgtctctactaaaaatacaaaaattagctgggcatagtggcacacgcccatagtcccagctacttgggaggctgaggttgcactgagcagagatcacgccactgctgcactccagcctgggtgacagagtgagactccatcacaaaaaaaaaaaaaaatctttttttccccaaagcaagttagaactcatttacctgtggactatcacgtactctcctgagcccaaggtgtctgatctcctctctgctcctacttctggtcataacgctctttcactccagtttgctgctcaacttttggcctatgcggacgcagccaggccagatcctcttttactttcttttctaacaggtgaaggcatgtgctaacctccccgggaatgagatgaacagagaggtttactgttaaaatcaaaaccatctgtggctaacttactcactttcttcttcccttaggagtaaatgcagatgagcaaaaccctaccagccttggaaaacacaccccccaaagctaagatgggctgctaactgcagttccgcctccacctctgcacaggttcagtatttttcttaattctcctcttctgggcccaggtcacatgccacacagtcaacggggcctggaatctgggctggcatctgagggcggtggaggcctcaggcgcactggccgccaagagtcaggtgactcaggcccgccattctcgagtgtctgtgtcagcagcttccccctgcctttgagaacactagtgagaacaggctatgacagagcccagggggcaccgaagctccctcttccatcgcaccaacacggttaggtgcctgtttttccctttaaagaaaaaaaaaaggtagttttacactgaatcagactgtttcaactcacacaacgccagaactttgacttctttagttccagcgcagcacagacaagaagttctggaagctcttgggaatcccaagggcgcctgctaaatgcgagagttttgtctaaaaataaacaaagaccacatcactctggccaaggcggcacttgatgaaaattctcagaggctagtctcatgcttctccaggaaggtcactccaaggtcaaaaggctgggcccctgggcagtgtcaccccgaaggtgggctttctcccagcccttcgcccttccctttactgccatcctgacctagatcagctccgctcccctctgaaatctacactcgtctcactcaggctccaggtctcccagattccctgacacagtcccatggtgctgtgactggggacacctgctctcctggtctcgaatgtctcctcctccccgttcttcatctgtctaaactcctgctcattcttcaagactcaggtcagctgtcaccccctccaggaagccttccctgccctcctctcttcagctcagttagagagactttctatgacttccagaggacggtgtaactcaccagtaccttgtgtaaacacactttcattcatttattacactgtgtctagcacatagtagaacctcaataaaaacctgcagtctgactgtccataatacgagctatgagctccctaaaatcagacattcggtagatccatctctgaattcctcagggcctgacgacttgtctgacacacatagtagctgttactccacattgattgaactgcactgagcctgggggccaccaccatggcaggtatgttttgtgctcatcacaggaacagtgacacacccaaggaggacacagtgggtgaggatgacacgctccacctggcagatgagttctgtcacatccatgagaccagaggcagccgagacacctcagagacctcccttatgcagccctcgctcacaaagcttcaggatctcattgtcctagcaggtctgcttcaaggccacccatgcccagccaccttggtgggtcctctggaaaggacgctctagggccagcaccagaggggaggggctgtcacagtctggagtcagggccccctcccagaacctagtgaacagcatgagtcttcacactccatacaaaggggtgtccctcaaagctacccaaagtgcagcaggaaatctcatgagtcaagactgtccatcctgttcaccccacaggatgccagccagccccagactcatgaggcgcgatgctcaccagacccagggaataggcgtgtcaggagtcagaggcctgcaccaacagaagccaagcggcacagcctggacccttccctctgtcctccaagccaagggctcctttcaaagcttcagcaagcttagatgagctcttgctcctgcagactgaggtcaggttcaggtggcaaagggatctagaagcagccggaatcacaccgcaggccgagctgggggcaggcgctccagctgcaaccacataacccgcacccggaagacgctgactccaggtgtccaaggcagctcccccaacgtgagaggaagaacaaaaaacaaagatgcccactgcaaagcacctaaagagaatccagaaggtggtaagtgggcccctcactctcagtctaggtaggtatgcagccattaattccttggtttccaaagaattcattcacagaagtgtcggtggcagcagagccaagacggtgaggccacatcatgacccatacatgcatttaacgttctatgcttaggagcaaaagtaaatcacttttggtaaaaaaagatttcgtttcctagagagaaaacttagatttcaccagtctcaactcttggtaacagacacactgcaaactaaactgtaatgcatactttcaacttttcctcccgaaaaaaaccctacgctatctgagagaggaagatgctggaggagaaaaggctctatccgccccagcctgacccgtccagccaagcccaactccagttgaagtcccctctgctctgtcctgtatcttgtcatcactgactgacctcctcagggcaacctgcctgactcatgtccttccagcctcccttcagtcctcgcaacagcacgcgcttgccacaggctgcgtgagatactcactaatgtctggtgggctctaagtgtcctcaggtgtggtctcactcagggccccgaacctatgggctggctgggggtgctgtcagcactgccatactccagaagaaggaatgggggccagagagacagtcgcctgctcaaaggcacatggcatggcgggcaaagggcagacctaggatttgaacccaggcttctgattccaaagctgaatgctacttttgccctcgatgatacagaattgggtttcacctagactctgcccaaagttcctctgtgacgccaaacagtcccattcttcctgcagccacaagaagcacctaggtggcatgcagccgaccatgggctttgcagcagaacccctgcctgcccagtcacactcatctcctacctggcactgctctgcaaggcactacgcccattgcaaggggcttctcaaacaagctctaaactgatcttcctaaaaacgctgggtggcaggaccagcaaggtgagaaatcagaggcccagtgagggttacagggcaaattaggtccagcaagtaggcagtctgtgcccactaccttccagccaggaaactgaatcgtttgactgccaaagggattacaggggagagcggttcctacggcccggtccccaggatcatgccacagaggggcttccccgcatcctgcactccttctggagactcaaaaccacagacctcttttcccccgggctcaggagccaggctccttctcctcacccagatcatggagacacccagctgcagagaacttagtctttccacttccaaacatgcagagaagctgctcccagccagcggacagaacctccctctgctcccaggcccatggccaaggccaatgccagagcaaggggaattccaggcagggccgaggcctctcccagctgggctttgtctgtcagggtgcttcaggcttcagccagagggcagcctgggagggagggtggcctccacggggtgggggcaggcagcagcaactggaacctgcataagccgcctctcctgcacaaggcacagtccagctgccaggacacacagcggccccagacaggacctgtacaaacccagctatccaggagctcgagggcccacccacgccccctcctagaagctgcagcatggcacccaggcaggagttgccagggaacgcccactgggcaatgcacgtgtcttacagcaggaactctcctcccctggtgagcactggatggaaaagcagcagggtgtggtagaaagaatacagggctgaggtcagctgggccaagttcaaatcccaacctggggtgagtgatttctgcaggcagcatgtcttcagcaatgaaatcgggctagtccctgagccacaggttgtgctgaggattaaatgaactaatgaagcaaagtgcccggctccacactggacacccagcagatgtccaatcaatgtctgctaaatgaatgtggaaattgcagccctgagaaaaatagcaattctcctcttctcccttcactcggcccaaacccaactccccacagggggaagagcccttattcactactcaccaccaccacaacacagccgggcagactgacacacttttggcaaagaggccaaaacctttttcagcaagctcacctttacaaggtttcagcaccttccattgggactggggggtggggacgggggatgggtagcatgtttcacttggctaatgaactctgtgagcaatgatcaagttcacctgctggtctacgctaaagcaggctgtcttgcaagcaggaattaaggttccacgtcatgagaacacagcagtagggcagggactcaggagacagagtctgcacctttgacaactggctacgggaccctgggagagtcacctcacctcttaaggatcggacttctcttccagaaggttacatcagcaggcccaagaagctctcactctccaagccccctggccattctaaacacaattctatgaaatgtaatcctgagtatgttcacaggaagacaggctctgagctgacagagtgacattcactgcaaacctgggtgaaaaagactcaccactcactgggagttgccaggatatgccctggaacctaactgcatctttcctcccctgagccccaggggcacacggtatgccaaatccccagaaagaacaagaccactaggactgtggggaggcagggcctgcatgagaactgccctgaaaccacagcctgagtaaaatctgcccccttcaatctggaaagaaggtggttcaaagggactgtgctgaatcttggcccagcagaaacagaaatgacctcgatgatgcccacagcagacacttcccctagggatgggtgcccttcagatgccacttcaccaagacagagcagcagcagcagcagcagcaaatgccaataggtttgctccgctcccgaatacgaaagcccccaatctcctgctaaggaatagggaaactaaggaaccgacccgtaggtatgcatggggtctattacagccctcactcctcagtcttggatgcacaagagaatcgactcaggaactttaaagataccaatgctgggttgctgcccccctctccaagattgtgatgtaattgggcctgaatgcagcctgggcatctggatttttttttttttccaaccttcccaggtgactctaatgtgcagccaatattcagaaccattactttactctagcttctagaagttcagagcacaggggccccagcacgctcctacaaactcttcaggggcagaaaggacagcatgcctggccaggcaggccttgctagagatgggtctccttattcttccttcaaaacacacgcacactcacacccccccgagaagcaacctgcaaagaaccatctgtctgagacagaatgcagggccgctgcccagccctggctggggcgtaccaagttcagtcacactggaggatatacaattgtgttcagttacttgattactttaggcacgtaaacaaaatatgatattgtacagacctggagtggcaaccaccacatcataatttactttgagacatctgaattacaaatgcaaaaagaaaaaaaagttggaaacacttttaagaatctctctgaatggaaaatggaatctgaataaatggtggtgtttccagtgggctgccaggtttacttcctgtttcccccagaaggtcactggaaatgttttcttgtgaatctgccttttctgagattgaagcaaaacatctcagcctcccaaactatggcactcactgcctttggtcctacagtacatacagattccaatcactccaaaaaacaaaaaaaaaaaaacaaaaaacaaaaaaacacacagccatagcagaggggagaggaggggaaaaggcagttaaaagttctaggtttctctgtggtgttaacaagactaaacaaaatttctgctttgagataaaacagaacccagtgcctctatcatatgaacacacagcagggcatatggaaagcaaccaggctctgaaggaatagagctccttcctggctttctgccttccggctatgtggccttgggccagttacttggcctctctgagcctcagctgtaactgcaggtttgctttgagaattagagagtgtatacaaagcccagggcccagggtgggccttcaacaaccagtgggtgctgccattattctttgaacaatctgcacccatttcagctaaatccttgggaatcatattatactagcgcaggggaagaatctgtttctttgtttaacaagagaacaaaaagagtgagtggagaagtcaggagttagcctgccactgcgttctgaggtcaaatgggctgtttacgaacatgatttgctttcaccctcctgagactggcaccgtgaaaaaagtccttcccgagacttacagatgcccaagaggcaatgtggtctccatgatagtccagcgtggtctggccaagctgtcccccatcccccatgcaaaagccagcttccccgtgcagcccccacagcaggagagacggagaaccattaaagcgggggtgcctgtcacactcctctgtaacccctgacgtgatgtgaaattctacaaggtagaccctttgaaatgcaaaatcttccagagtccttcaaacgtgtttttattttctcgggttcctaaggctgctttcagatccacccatcagcatttccccctctcaatcaacccacatttaacaaaaaaacaaacaaacaaaaaaaacgacaagaaaaacccaaggacgtctctatttttcagaaaagctcaagtatctccaatcactgtgaggggaaagaaaataaaatcttcagctccagcctcctcgcatcactccaagacacccagaagccaagtttcctctggaagatttcctcccatcctagccagcacagcactctgttgctcaggatctcagagaactttcttagataagaatccgagttctccctgacctaagttcggtgaggttaagacaggcaccaccaaaaccacaacccgcaatacacgaagcccaaatcttgccccaaaacgctgtgcacaggaggtttggattaagcatcaaagaagttaccttaaaacaaagttgtttggcaaagaaaaatacttcactgtaagaagaaccctagggaacggtaaattgcttttgaatatggacttttcagtggcgcagtcattaatcatgttaatgtaaactgcgctacaacaaaaattttctaagcaagtctcagggtacatcagcatatctaagcctctgggtttgtttccaaagttcacatccaggcaggcaatgaaactgctgttaatggggtcagctattacagtgccgtccccaaccttgagccataataaaggtgactcagccatccagaaaaaaccctcaaacttaggcaggaaacaaacaaattaatcagagaaagagagtcaatgatttttggaaagtgtatccgttggacaagtttaaacagaaactctccctggatgatcagactgacatttcagaaaggagttgagggagaacaatcaacactcctcccagcacccaagtcccctggccagaccctgttttgtggcgtggaggggagggtagcagccggacgaggcaaggaggaggagagtccagcagagctaagcttcgctgagccccgccagctccggccatgtgctttgtgttggcaacgaaccggttctttcaaaagaggaagagtctgacaaaaaggacagctgcagcaaagcagaagctgagggtaaaaacctctccaaagccctgagctcgggattctcccctaaagttaaatcaaaacaccactggggtttgcaaggactagttcatctattagtcttccccttgctggatcaattaaagagagtccctccacatctggtttccatcgaaaaccgaaacttgtattatcagcatattacataacaaattatgcctgcaggtttcttttattacacatcagagaggtgtgcgtggtggtggtaatgatgggggttgtgccgatctgagtatttgcttatttcagtctttttatttaaggacaagaacagaagagttttccatacaatgcgcaatttaactgcagaaagtcacgctgcccaaataaaacatcaactgaacaatctgaaggtgggcccagaactcagtcttcagggcccaaggcatcgagcggtgggtgagaagagtgtgctttttaaaagagctccgcagcgtcccctgctgccagctcctaatatttaaacacagctctctcctctctggcctccaaaaggggaggagagcaggctggcccttcctgagcttcaatcaagggtcaggcgcctgctcactggacccgcttaaaggaacccaagcccactaggcttctgtagagaggatggagaggctagcggggcagtgagagaatatataaggggaaagagaaagactaaaagatggaaacagaaagagcccaggaaataataccaggacttcccataaaatgtcaattaagcgtaaccaccacggtgacaataaggtatcataaagctctttccaaaagaactttgcgtactttcaaaatgctatgtgcaacataccccacgttgaaaagagaagagggaaactgatttaaaacattatgaaccaagacagtggaatgctctctactttgtcctgagaagactggaacattcaagtccacttctgcagcagtgaggttgctagtttctatttaaaaacttgtctttgatatcaaaatgactgcacatgaatctcaccttctcagaagaaaataggaagtcgttgggcaacattatttgaatttaaatcgcctcgttctctgaaggaacgtttggaagaaaaaaatacaggccttccccacgcctctccttagctttttaacctgaaaaagcgcctggaagctggatcggcagactcccaggtcgcatgatgggtgacagccaagtgcagacacagagtcaagggctaccaatcctgagccaaaccttctcccactgaatgggactatcaactgggacaagtagctgtttctgtagtccacagctagaggcgggggaggggaccctgtagacctgcaattcaatatcaaaactgtaactgacacaagttactcttaaatagataaattaaaatgaaacaaaaacctggcctaataaggaacagtgagtttcacctggtcggctgactccattccttcccaagtcctcaaaccaggtggcatcttttaaacgagtccaggatctggagcaaggaggaatctccctgccagccggtggggactgctgggaacacatatgctagcatgtcatttggaagtctgctaatatgttgtaagcagcacaagacgcttgcctggcttcccaggccaataaacaatgccattccaactcctgcagcagtcaataggaaacagtcccttttctccaccatccaacaattgaacaaacatttgttcctgttgaacaaccgtcagcctggctccatctgcacccgctcctgcaaggcgagcgcggcggcgaaggcgacggcacaaatgcccaccccaggatcccagacccggaatgcaagccattccgggggccactttcctaacaccaccgagtccggagattgtaccgtatggaagactcggagtgtggcctataggaggcagaatcccattcatcaaacgctgcaaagagcttttctttgttcaccatcgtcctaagtacagtacgtgttaatgagcccgggcggtcagatggaaggagctcggcttcagggggcgtccgaacgcgagggacccgggcaaacctgtccgcgcggttcgtcgctgctgcggcgccccggcccgtactacaagcattgttccccaagtccgaaaatgggggtggagagctgggggctgggggacaaggtgggggggcggggggagcgagaacacacttgggacaacacaaaccgcaaaccctccccggattctgggtgtcctcgtttctttcgtctctgccccaagagaaaccctgagcggggaacctgactcccacgggcttgcaaaatccaagactagcaaaaatgtgactcgaccagtgtgcctgtgccggacggcccttctcgccatgtgcaaaagccacgccggcgcggacgcccccactccgcaagccccagcggtggcctccccgcgggcttcccccgcccgggacagaatgccccctcacccccatcctgaccgccccggacagtccagcagcagcggagcccgccgcctcgctcccgcaccccgggggtggcgggtgcaaacttccgcgaacaaaagagttgtctgcaaacgatgcgggaacttcggggcgaatggggccgcccggctcccgagactccgcgcctcctccgcagcggctagtcagggctcaagttgagacgcggagaggacacccccgggcgcagcagtccccgcgcccgcccgccctggcctggggagcgcagacttttccgccgcagccaggcttgttcttccccatgcctgtgctctgacaagtctcacgcctgcatcaggggcgagaccgagcgcccggagaaaccgcccgacccaacccaaaggcgaaacaaggcagaaaaaaaggaaaccagcaacattaggaaaaaagaaaaaaaaaaggcaagcccattgcgcacgcgagccgggctccctccagccagcggccgggacgcacacggcccggacctcgctcggggccagccccccggccaccgccgccgccgcccggccccgggtcgcttactgtgcgcggcggggcgctccgggcgcggaccccgcgccgtcaccgccagcgctcgccaagtcgtccggggtgcccgccgcgcgtccgccgcgcgcacgctcgcctgccggcgccgagcgctttgtacgagcgactcccggggaggaggaaatcgacttgtcacttcctgaagtgtttgcaactcgtccctttaaccggcaccggccaggccgcccgcacccgccgccgccgcggagccgccagaccgcggctgcgtgaactcggcccggcgcttagcgggcggtgtcgcgggcccgggcgctaggcgcggcggcggcgtgcaggaggcaggcggcgtgcggcggcggcggcaggcgagtgtgcagtgcgcgcagccgccgatgggcggggagtgagggactcgcggcgcgccgccggcggggctagagggcgtcctgcgggctcagccgcgcgccgctcgccgcgctcgcgcctgcgaggccccgggacgcgggaagtggccccgggcctgggccgcgccaccgcggctgcccgggccccgcgccagaggccctacgggcttctctccccgcccccagcacgagccgggatgaaaacgctgggccgcataggcttcaggcgtccagcttccgggttgttagatgccgaggttcaaaagaaacgatcacttcagtggcgtgcaggacagcgggcgggtggggtcggggaggggggaccttaaagtgttgtcacactttgggaaaataaagcgcaaatttcctaactcggggcgctgtgactgtgtacttcagaagccacatccaaaatacatgcaactggcgaaggaaggatttgtggttgctaagcagaggcagagcatgtttagttctgtaacttaggatgttgacttaagttcaggaatgtaaccctgatagaataagcagagtattttcattgtgctgctcacctgggggagggggattgttttccttgtgaagccctagatttcccattactccttcctactggtgtatgttattttattgaccttgtatccaaaaagcgatttttaaagagaagtttttttaaaactccctatgcctgttttgtgttctcctttgccaaaaaaacaaaacacctcattactttacatggattgtgtctgcgccatttgaatggttctattcataaataaggaaactttttctgttgcttctaggaacatttaattggttttaatccaatgtttcaatcccagtatcaaacataaatgaacaattaacttcttgagctttgtgtgcttgggaaactattatatttcatggctattgctgaaatatttcagaatatcatcacaccggacccattcttttcagaaaagcatgaactgacatctcctttcacactacagctcgctccactgagttctgctgcatgattagaatggacagcaatcagtggaaaggatatgagtctattcatttcaagttacatgatgtgggatagagtcagttcatcctagaaagccaaaatgagctaacatacagaatacagcatactaagatattgatatccttacccatatacgttgctttttaaaaatgcattaaggaccaatcttgaaaggaacaagatccaagaaccgatggtgaacaaaagaaggcccaaggaataatctaagaatgctgctatgcttaacgaaaagagtcagtgtttccctaaagccatctgatatcacacaatcacctcagcctttcagagctttaaggacagagtttaatttactaacgttttattaggaagcctagagtgactcctgctggcaaacattcagtttattcctacaattactagttcatcaggtcaacttaaaaaacaagatgcagggtcccaggcctggaaacaattattacaaccattattcttgttgctttcaggatgatttgcgtttcacattccaaggatggtggtcatggccagttcctctgctgtaacacctcctttccaacctaaagcagcctgtttttctggttctgaggctttcttgaggctgtctagaatatacttgcttaagaagttatgctattaaccaataaatagttacttctcattttctagatttgtatctccaaaggctaaaaagatatgcatacattaagacctgtgtcacacttaaccttccatactataggttcttcccacatgatataataatcctacagctatattataaaacatcctcacttcttagtgctcagctccatagttctttactaagaaaaaattctacccaaaaggttgttgttatattagagttctgctcaattcagaagagtagctaaaaatgtagaactctagatttaaagctatgtaaaagctgcaatggggtggggacatggagctaaactgtctatctttgttcaatccaaaatggtcaaaaccagattttgcacacaaccagacacctaaatgcaaattcataggccaatttaggaataaatccataaataatctaaaaactattacttgtaacttttccattatcaccaaccaacgctaacctgattaagccggagaacaccctgggaaatataaaatgcagggattacttgcagtcttttacatcaagaccaatatatgacggcccggcacagtggctcacgcctgtaatcccagcactttaggaggtcaaggcgggcggatcacttgaggtcaggagtttgagactagcctggccaacatggtgaaacctcatctctattaaaaatacaaaaattagccaggcatggtggcagacacctgtaatcccagctactcaggagtatgaggcaggagaatcgcttgaacctgagaggcagaggttgcagtgagccaagatcgcaccactgcactccagcctgggtgacagaaaaagactccatctcaaaaaacaaacaaacaaacaaacaaaaaatatatgaaagccagggataaaacacagcaatcctagttctcccaaaggaggactaccaaatagaggcacacttgtgtgtaaggtgtgcaacacatttccactcaaaactgcctgggagatagaaattgagtatcattctatattagagagctcccctattacaagtttaaagctcttaagcaacaggatgacaataagggtgtgttttattaagggtgtaacctactataacttgtatcaacaagctaataaaagtattcacctaagcacatttgtgcagacgagggtaaaggttgggttttgatatgcactaaggagtgtcttaggtagttagtgggtgttttatttttatgcctttagaaccagataaatgtgacgttcaaacaaagagctgagctttgaggcttgaacaagtaccagcaaatgttcagtttttcccatcaaatctatctgtaggtatggttgtaaaaagagcttaccactaaaaaattataaactggtttgagagaataacatactatcctttttagactaacaagtgaactaaacaaacgccaaacgttatacactggatccaacagcagtatgcagatgcacgtgtattcacccctttatttggcttccaaaagccactgcctctttgtcacaacccttgtattaaaagccagtcattcacatttcacactgttctttctacatttgaaaagatctttttaaaagcagaacctttttaaaattgcttataataaattatgagaagacagacatcaccaagtccaccttaagtattttcaaaaagataggtgactggaaatatgttagcaaaatatacttctttggaaaatataagaagtttctggttacagatggaaataaaaaatctgaacctatcatgggggcaattttcacgtcttactcagaaaaaaaagttctgtaaattttcccacatctttgtccagctacaactagtaaccctacctacattagcatgtagggatcacatgacacattaatccctctgttctttcctgtctgttctttttatccactgatgaaaataagaaatgaattatagctctggctggaatcatgcatgtgtgtatatacatacatacatacatacatgaatgatacatatatatacacacacacctttttaaagaggtatttggttgctgaggacaaaattactctttgatccaagaactaaataaaacaatttattttcactgaaaaataacctcagcaatgagtttaataataccaatcccactcctttgatacaaaataagagttgaaagcagcttgaagaggagtgactattgagatcagcgcatgtgaagccacacagctttgtaactgactgtctagcaccattgaggtacgaaagcatgccagctgggccagcattgtgcaccacaaagtatgggttgtgagcctaagtcctgaacacaaaccctgctttccaagttggcaggtgctgaaaacacagcaaatgtcacgcttgcaactcactggagggaagagttctggtaaagtaagctaaaaagaacagagcaacagttaaaacttatttcaacttcatatttttttttcaaagttaatagtaactactggtattatgtgctacaagaaaacacaagcatgaataacaaacatttaaaagtttatgtatggtaaataaaaagctttaaaaaagtgtaagaaaggcttttcactatctacaatcaaagtaaatggcataagtaaaacttattaagcctattttattatcctaatactaaggttcaaaagcatctgtttatgatcttacatgaagtagatgctaattattatcattataacatggtgagttccctagtttgcttcagttaccccaccaaaaacatatctaaaaacaaattacagtattttcatattgctatattataaattgcatttaatctagaaaatatttcaactgtagaccaggctaaatgtttatgttaccatctttaaatgaaaccatttcaactttttttcttaaatattctttagtggaattcacattcagtatttgagatataagctcaaaacttaatttttctcttgtcaactatctgccataagtcactgcctcaagaaaaatcgattttgaattcatccctagtgatatgctcaaagctactgctctcctgcctttccccctaaaaatgaaactgagtaaatttcattttcattaggtagaaaggaaactaaaactagatacagttggtgatttcacagagcttaaaaacccaatctaaaggctgaatcctttggatttaaaatgtcaagaaaagaaatcagcctctagttctaaaaggcagaacattcctgggagcagtacgaaaagaacatttagcctacatactagcctgtgaatttcttaactctcctcagcagtttgtcaatctattatattaaccaaaagcaaagatcttttgtttgaattcatacccatgactgttctaagagaagactagccttgccgattttgtatgtgcgtaacctgcagctataggtttaactgtacctataatatgaaagaattgacatgaatgagaagctggcttactattttaattactagttacagcttctcttaacttttacaagggacaaaaagcaaaaaaaaacaccttgatcaaaaccaggttagtcaaccactgtactcttaaactacctaacataaagaactgaagctttgattctgttctgtcctaaagaggtacatcatatcatattgacctcaactctgtagaactttcttaaaatggttaaaagactaaagccctctaggattaactagagaaagcaatatggctctggccaacatgtctatagtcatactaagcattctagacattgagatagtcatataaccaccaataaaaaggttaaagaaataaacaaacctgaaaaaccaaatgttttcttttgtttgtttgtttggttttttttggagacagagtctcactctgtcacccaggctggagtgcagtggcgtgatctcagctcactgcaacctccgccttccggcttcaagcaatcctcctgccttggcctcttgagtagctgggactacaggtgcatgccgccactcccggctaattttttgtattttagtagagatggggtttcaccatgttgccaaggctgatcttgaactcctgagctcaagtaatctgcccgcctcagcctcccaaagtgctacgattacaggtgtgagccaccgagccgggccaaaccaaatgttttctagagtagcataaataactgattcaccatactttttacacactacactgtcaattctagtataaactaaggacaaatcagataaactaaagtattactcaacatcaaacgaaaatgtcaccgtgaatggcactgttaacttacagcaaaggaaataaacctgaatcactgatcaaggatatcaaatctggatgatgcaaagtaaaaatcaattataaaatctcaggccactgcttcctaaatggccaagacccaaatccaattcaacactttcattaaatccagttctaccagcttcctgatgcatgatcctacagggatatgctcttggttcctttgtctgatatcacttggaataatgccttggcactcagacctaatgaaggaaggtataccatatccttgtccatttggtttcaattcaaatgcacccacatttacattttcccccaccatacccacatttcttagtgaataattactggggccggatgcggtggctcacacctataatcccagcactttgggaggccaaggcgggaggactgcttgaggccaggagttcgagtccagcctgggtaacatggcgaaaccttgtctctacaaaaattacaaaaaatagctgggtgtggtggcacgtgcctgtggtcccacctactatggaggctgaggttggaggatcacttgagcccaggaggttgaggttgcaatgagccatgattgcaccaccctactccaacctgggtgacatagtgagaccctgtctccaaaaaaaaaaaaaaaaaaaattaccacttaaaacaggtaacgatctaaatccgaggggtattcttagtctctgctgacacatcataaaggacatttcatgaaaatctggcattataatatctggtcctcatttcttttttttttttttgagatggggtctcgctcagtcgcccaggctggagtgcagtggcactatctcagctcactgcaagctccgcctcccgggttcatgccattctcctgcctcagcctcccggtagctgggactacaggcgcctgccaccacccctggctgatttttttgtatttttagtagagacagggtttcaccatgttagccaggatggtctcgatctcctgacctcgtgatgcgcccgtctcggcctcctaaagtgctgggattacaggcgtgagccaccgcgcccggccaatatgtgatcctcatttcttaaatgactgaaaaaaaaaaaaaaaagtacttcaagcccagcacagtgtaccgctcaggagtcccagctacttaagacgttgaggcagaaggactgcttgaggccaggagtctgactccagccaagcaatacagtgagacttggtctgtcaaaaaaataaataagtgcttcagcaccagcgctagctagagattaaggaagaagctacacagtatgatttctaagaagttctgaaaggcctacctaaactttccctctcacttgtctagcactccgcctctcttcactcatttaatcactcctagaacacaaatgcctacaatggaactgaatatactaaaactgtggcactgaggggtaaaatctcaaacaattaaacatattagctccatgggaagaagggtccttggaggaatgaacactgatttagccttggtgtgtgccagcaatcccgctaagctgctttacatttctcacttaatattcacattcctaatatgcagggtctaaaccactgcttctctctccaagctgtttcaaagaaatgtagggaagggaaaccaaccttaagtacctactatacagaaggtactttgctatcacctttaacatacttctgtttcactggggaaataagcagttacagagacaaactgacagtagcctggagagacacagggcataagaagggcagactcatatactatatatactgtagtatatacagcatactatatataagaagggcagacccatatactatatatactgtagtatatacagcatactatgtataagaagggcagacccatatactatatacactgtagtatatacagcatactatatataagaagggcaagggctgggcacggtggctcacgcctgtaatcccagcactttgggaggccgaggcgggtggctcacgaggtcaggagatcaagaccatcctggctaacatggtgaaaccccgtctctactaaaaaaaaatacaaaaaaagtagccgggcatggtggcaggcacctgtagtcccagctactcaggaggctgaggcaggagaatggcgtgaacccaggagacgaagcttgcagtgagccgagatcgcgccactgcactccagcctgggcgacagagcgagactccatctcaaaaaaaaaaaaaaaaaaaaagaagggcagacccatatactatacccatatactatactcatcttagagtggcaaattaggtaatctgtgtgtagtttgtgtcttgtgtcaaaaaagaaccatattggggagattcctcaaattatcacaattttcctaaggcccagtcttgatctctatatataaaaatggaagtggactaaacaataagatgtaaattcctaaatttcctggatatctctaggccaggcacggtagctcacgttggtaatctcaacactctgagaggctgaggcaggaggatcacttgagctcaggagttcaagaccagcctaggcaacatagtgagaccccatctctacaaaaaataggaaaattggcctgacatggtggcatgcacctgtagccccagctgctagggaggctgagacaggaggatcacttaagcctgggaggtcaaggctgcagtgagtcatgatcacaccactgtactccagcctgggtgactgggtgacagagagagaacctatctaaaaaaaaaaaaaataggccaggcgcggtggctcacgcctgtaatcccagcactttgggaggccgaggcgggtggatcacgaggtcaggagatcgagaccatcctggctaacatggtgaaaccccgtctctaccaaaaatacaaaaaattagccaggggtggtggcaggcgcctgtagtcccagctactcaggaggctgaggcaggagaatcgcttgaacccgggagacagagcttgcagtgagccaagattgtgccattgcactccaacctgggcgacagagtgagactctgtctcaaagaaaaaaaaaaaaaccctttgctcaaatgtatacaaacttatcaaatagatatcagtgacaatactcaaatacaaagtttaagaaaacatggacaaaggttttttttagattgaatactcatctgactgcttcaaatattttatgtacatatgtatatatgagtacagataccttggtttaaaagaaccatcaagttacctaacaactgagagttagcaaacggggtatttaatctccccatctatacagtcgacccttgaacaacatgggtttgaactatgcgggtccacttatacttggcttttttcaaccaaactcagatggataatccaatattcttgggatgcaaaactcacctatgtatagatttggttataagcaggtggtcccagtatccctcgtgcataccaagggacagctattctagaagcctattttgtagggctttttctaagccttaattgatttcaggagtattatggactaaatgctggtttcccctacaatccacatattgaagccctgaccccctacccccaatgtgatgatatttggagatagggcctttgtgaaataattagggttagatgaggccatgagagtgaggccctcaggatggggttagtgctctttactttgtttttgtttgttttttttgagatggagtctcgctctgtcacccaggctggagtgccgtggtgtatcttggctcactgcaacctccacctccaaggttcaagcaattctcctgcctcagcctcccgagtagctgggattacaggtgtgtgccaccaggcccggctaatttttgtatttttagtagacacggggtttcaccatgttggccaggctggtttgaactactgacctatggtaatctgccctccctggcctcccaaagtactgggattacagacttgagccaccatgcccggccggggttagtgctctttataagaagagacaccagagagcttatgcgctctctctcctccaaccccattgcacacaaagaagtcatgcagacacacatagatgtcagccacctacaagcctagagaagaggccttaaaataaaacataccttgccagcacgatgatcttggaattccagcctccagaactaactttctagaaataaatttctgttgtttaagccaccaagttcatggtattttattatggcaacatgagctaacaaggatacagaatgttaaatatcactaagtgcccctgttttatggagagaaaaactgaagaccagaaaagaaaagtaacttggctaggtctaatcattttttctccaaaattaaatatttttaaaaatcatttgtttgacatctattctattgcttaatagattttaacaaattacctgctgttataaaatgaaaggaaccaaaataaattcaactgaatttcaagttcagaaaataatctgcttaattcattgcaaataatgaaatgatctcacttctgctacataatgtcttcatcatacaaattccaacaggataccttagctcactaactgaatactgggggaagacagcttatttcgtagtgagctccagtattcagaattgcccttttagtttaattcagttaattactttttaattaaataacaaccacaacagttggtagtttcaactacaaagccaataattctgtcctatctcttgaacaaactatattatcaattgtttgatccaactggctctctcactgaatctgggctttccctctaggcctgttgggtttacagaggggataaacagctcagccttgtgtgccttgcttatgactgattcttaaaaatcaaaatattactctcattcaaaataacagtataaaagcagcttccctgaaatacaaatgcatctcaaaggttctatttatacatagcaccacatgtagtttgcactcacaatttcaggcctttcttccaaagcttgcgtacagctctttaattttgccaggtatgtttcattaaataccatattatgactttccccattcagaaaccaactaggcttcttactgagaagatagaaggaaaacctaattatcactgcttcaatgcatctaaatttatttcattacccaaatcaacagagtaggggctagctgctgttgcagaaaggcagacggatatggagtataaactgcgctttcctccattcttccttcccctaccccacccctcaaagttccatggttggaaatcatcctaacattttttcatcctaacatttttttagccaggatgtactaaaattagatgggaacaaaggcctgacattttcctattagcagaagggttaggaggaaaatgtgaactgacagcacccacactcttctacatttagcctcttcctcccaacagttctctcctctttgcagcagtaaggcaggcaaagctggggaactacagccatcccaatgccatttcgattctgctatcatcaatgataagctgcctgatctgtaatatattaatgaaaaatgagaaatacagttcacagtccccttattcaaccagagtgttttcatattttttcctaagctactcagaaatatacacgatatgctaattgctggaacatgtgtaaatttttacatatttgggaaaacagatgtattagatttgcttttcttaagatgcttccagctactatgaacaataaagatcactcattaaaatacttatcatttgttgatacagtacagtaataaaaatacgtacgtaaaaatataacatggaagaatttatcttttctcatctcttcaggaaacaaagaaatcatttcttttgaaaacaaaaatgtagattttggctttttatttcttcttctaacaagctaggcaagtaatttgcaaatactttagggctcaactgatctcctagtttaagtctcttttacagtggtatcagcatgacaaaagtacattctgccagcctatacatttcagtttttgaagtcctactccagaaaagcaggataggatattgatacattcatgtcttaggaattattcctatctttttaagtttatttccctgggcctaaactatagtgacagctcaaaattcagctagagaagtccttttaatgatcagtctaatacactgtgttgcaaaagatttttaaaactcagtaagtactgactcaagctctcttttttcctggttactggagcccatcttgacatctaagctggaaatgaatgatcgttcaacaacactccagggattttgctaaggtcatattcaatcattcattaggcttcttacccgtcgcttttcagagttccattgtagagctggttttattcagcatttatgtagcctgtgggcttgggtatttgtctgcttgatgttgagtttcatttctatgccctgaacataggaatccatcaattgaccaaagaatttcaaactattcttttacttttctaacaaattgcatggtgtatatgaagaataaattagcattaattttcttccattaactgttaataaaacatgctgatgagctccctcttcttctatggacatctctgtttcctgcctaaccaagagaaatgtaaggatttcctaatttttttccccactatgcaattgtctttcagccatatatgctcttcacctcccacaatcaagctctaggtcatgggcagccttcattcagtgaaatgtacgagacaagacttctttcagagcccatcaacactccctcccacacacacacacacacacacacacacacacacacgacattagctaaagaggttactactgtggaacacaagacacttggtctcatactctcaaagcagagggctgtccaggagcacatacacgttagcttacagagccaaaaacaggaaatcaaaccccagggctctcccctggagacaaactgttcacatttgtacagattttcattgtaggctaccagacagagacacacacacatacacacacacaattcgtaaaataaaattacttaaaagaacatagacgaaagtcattaacatagcagggatacactatttctttgtataccaatttgaagaaaattatttcaaggccataagaaacttaactactaatataagttccttaaaaattgaggtttctattatactctggataaatgtgaattgaggtcaacatacagtaccacattacagtatcatagaaattttaaaataagtaagtccactgaagcacatgattcataaaaagactaaaagtcttttgtatatacttagctcccttatttcttcaaaaaaaaaacaaaaaaacaaaacccagaagattgcatgcgtaccacagatgaagaaaaaaggaaaattcagtgctactacaatgggaaaaaaatcattcaaggacaatttgtacttatttttaaatggctttagtcaggctgccaagagtgatatcaggtttgattctcacatacataaatgccagtcccaaaaagcaactctaacttgtgcacctggcttaaaacaaaatgtactgaaaactttgtatttgttaattgggataacccacccattcaggcctcaattccctttggacttgcacacgcacttcctacacacagaagtggcctgttatgcagcaataatcatagtgaaaagcagcaattccgtgaaggctccacagagaaatcgcgtttgcatttcaaacaagtttcctcaaagtaagcgtctttcgattaaatgaaatcacaattccagcttcttatccacagaaaacagcattcactatgtaacttactgctttttataagtgcataatttctgtcacagttacccacatatttatacaatttaacaatactaagttaaataatgtatttatggtttgtttcaggaacctggtgacacttgctggcctggtttttacagtttggtattatgtgaaaatactaatttcttattagcatttttggaccttccatttgttctggttttagtccctaagaagctagcttccagcaggattagagtaataagaagagatgacaacttccttttcctaaccttatcaaaagctctatggttaaaaaaaaaaaaaaaaagaaaaccttcacctttgcaaatggcactaacatgccccaaatagtgactcgaaaagcttttcaacaaagaaccattctaagctttttgtgaatcaaactcaacatctcagtctagtcacacagaaagcctagtttgtaggattagcacattaaaatagcatatacttaactcaaaattctaagagtacttatctatgttatatttgaaatcaaagaatattaatgtgaaaaaaaacaaagacccgatctcaaaaactataaaagtttctacagtttaagatctcctgtcttggtaaaatcaacacaatcttctaaaaaatttaaattgcatatattttgaagtaatttctcactttttacatgttgaaaataaaagcttttcaaaaaatgttatttttgttgacagtccacatacatgtcttcaactatcttgtcttaatggttgatcaatgttgatctaaatgaaaaactcactcctctggctacccctccccaaaaagaaaagggacgtaatgttagacttactcaatacaggagtaacatttgccaaacaaaaagtcacttatgtaacccaataggcccacaaagctgaaaatcatcaaaaaattatgcaaaaatttgtatttagctccaatattaaaatattaccacaaatacaaaatggtattaagtatgaatatgacttatcttttcaaaaacattaataaactgtttctcttgccaaattagcccctaactagaacatctttgtgcatgtatcgctgagggcttatataacttacactaccctttcacagaagaatgacaaaattcttaatagaggcaagtctttgagtagggagatggggaaaagtaatgaaggatgatatgagacagagttggctgactgctattctgatactccacagatgaacactaataaagtaactacccatcttttctaactgaactttatatgtaatcatcatgggtctccagctgtactgtaaatgctacaaaggcaaagactaagcacctgtgaggcagaatatgctaggagaagagtatgtgttttaaagtcagacagacccagataaaaatcctggctccatcctgtactgttgaacctcataaaagtgacttcacttctctcagcttcattttccttatacgtagaaacaagaacaagcaatacatacctcaagaagacattgaaaggactcaattacttaataagacaacttaacatagcgctagcaaataataacattccttagttctctttccttctactacccttacagtgtgtagaagaccatagctgcaaaatgcaggcttgataacttgagcaactgatacatttctctgattttgtttaattatatacataaaggtaagaggccttttcacaggtattaattaagtttaaaaataaccgccatccaacacaaaatagtatttcttgttatatttcataaacagtctaacaaaacactaacaaagttattttgcttattattctgatgctggaataatttggtcaaatattcataaatagttatcaactttaccaaggcacaaaaatcaagaatacatgctttctataaactcatttactactttaaagtttttaactgtttagcagttataggaaatttttttaatcgaaaagaaaactatttacatttcaaatacaaaagaaaattaaaattattcttgattgatctctaaaacccaaccacttagatgctcattattattattttctttcaccaatccagtatactctattcaacatgtgcatcctgtgtacttactaagcatttatttgcacaaggattttctgtgtcaggttaactttgctgtgtagattctgtgtagctacctgaattcgtccaagaaaaagtctcacattttttggaaaaccaatgctgctacactgtttccagatctgcctccaaagctgaacttgggtgttggtagctcttcgagaagttcaaatcctgtcagacaaaatttaaatacttttattaagaattgagtctcatacttacatgtatttatatgcatgcattaacactgtaccattgaaccctttgtaaaactatgattccaaactctaaattgtgctgaatttcacttcatgatttttcaattctactatgtatgtacagcatatgtatgctcctccaaaatcactttgaatttaacaaggaaaagacaagaccaaaaacaatttggaaaaaacaggctttccatccacctcccatttcctccacttcctgtttgtcatctctgcaaagctgtatctctgttagcctctatcacctggtttgtaggaagcagctagcatgtgtcgagtttttttgtttgtttgtttgctttttgagacggagtctcactccatcaccgaggctggagtgcagtggcacaagctcagctcactgcaacctctgcctccagagttcaagcgattctcacttcagcctcccaagtagctagaattacagttatgcaccaccacacccggctaatttttcatattttagtagagacagggtttcgccatgttggccaggctggtctggaacgcctgatctcaagtgatccacccacctcagcctcccaaagtgctaggattacaggcgtgagcaacatcgcctggccctgtgttgagttcttgctaagcgccaggcattattttgagtgcttcatatgtagtaatctaattaattcacaccacacatattaaagcacttaatacagaaaggcaaaataacttggaaatataaatgaatttgtagaagatgaaaaagttctggagaagggtagtgatgacaattgcacaaaaaaatgtaaatgtacttaataccacataagtatacacttaaaaatggttataaaatggtatgttatgtgtatttcagcagaattaaaaacagtaatttataacaaagatgaagactcaaactaaacgaactaataaagggcctggaagacaaggaactagtaactttcaaagcatcacagtatggtttaaaaaaaattaacttggcgtctaaaatcctaggttcaaatcctaggttcaaaaaattaacttggaatctaaaatcctaggtgaagtctcagcttcagcacttactaaatgagacaggctgtcaagttacctctaccatgatcctgatttctatgcactttctatcacttaaggctaggtattcaagaccagccggggcaacatggcgaaaccccatctctaaaaaaatacaaaaataagccgttgtggtggcctgtgcctgtgcgcctgtagtcccagctacttgggaggctgaagtgggagatgcctggatgatggaggctgtggtaagccgagattatcccactgcactccagcctgggcaacagagccagactctgtctcaaaataaattttaaaattaaagtaaaataaaacgccaatcaaggttttccctcattgatggacctattagttttggaatatttttttcttgaggcaggggtggggttctgtatttttctaaattttcatgctttgagctcaaataactcttataaacagaaaaaaatgttttaagtgatgtatactggccgggtgcaatggctcaggcctctaatcccagccttaagctactaacgccaatgcgccaccccacgccatcaaattcactgtgattttgtaaagatccaaataaggtaatgtagtgttttcctaaactatgaaataaaatgttatattattttgcttttaaaaaataaataaagctggaaggtcacttactaaaatgccaacgagggcctggcatggtataatcccagcactttgggaggccaggtgggagaatcacttgagcccaggagttccagaccagcctggacaacatggcaaaacctcgtctctgctaaaaatacaaaaattatccaggcatgatgatgtgtgcctgtagttccacctactcgggaggctgaagtggaaaagatcgcttgagcccaggaagtcaaggctgcagtgagccaaaatcctgccactgtactccaacctgggcaacagagagagagacagaccgtttcaaaaacagaaataaaaattatattattgcatcaattggtctatcatactatttcattatacatcctaattcatgttatctaatttcaccaaatcataataaccgaatattataatgcttattaaaagcttatcgtaagaaaacttttccaaattatgacattccttttaataaaataatatgatgtttcttaatgctggaaaatgcaggcattgtcctggatacatgcatagttatacacccatatttgttttcaaaaattttacaaatgctctggatatttaataataaaaattttctgtctgtataaattttccaggactaacttttcaactccctgaactaaccctacagaattggagttattatatttcaaaatagaatataccaaaatattaatagtggttgtactccactgatggtaaacaaattgtcttaattattttaatctgtatgcttatgtgttgacgttattgatatttttcaattatttagataataaatttgaattactttttcttttaaaggatagctccccaaacctgaatagattcagaaagactcccttaaattgcttctgaagtaagatgggtggttattgttttcattcattcactgtcataaagtcaagtcccttcgacatcaaattagaacatgggcaactggttccaggtaaccctcactaaaaaaattataacacaaagtatttgtacaatcaggggtatcatggaaaaaatgcaagatctgtttcaacaattttatgaacatttatagttcaaataagaaagaaccttaaaagattggtgaaacaagctttattttatgcaaagagaatgtggcagccagtatgagtagtcaggaacaagacctttggcagtgacgcaaggcagtgtattctgttactgtcccatatctaactccaaataccattttctaagggactcatgcctaaaaaatgttttcaattgtatataattatttatataacatttcccattataatattttgcttaaattctgtattttgttctaaaattgaacatagtttacttaatagttttcagacaaagacacatttttaagtactctaaccaggctaaagtctgttcctcattatcaaagacagacaaatatgtttttgtctgctggttctaggagtaaaaaagaacacctgtatttaaaaaccaggaaagaaacttgccctacacagtgtaactttgagcatttattaaaactgtcaaagttcaggaagaggaaagacttattgatacagggcctcaacagttctaaaggaaacaaatttaacatggaagataataaaataaatggcatgaaagaaaagacaataaatcacatataattcttgttttccagaggcaatagtaatgaagccataagctcatatttcaagcctcaaacacttcaggttttacattatataatctgtcaaagccattgaacacacacaaaaggacatgtattaagtgttctcccagcctgttcccttaatactaaaaagaaaacaaactctaaaataaggtatatgcagtacggttataaataatggtacacagtaaactattctcttgaggtaattcactttccattagcttgtgacaactgaggttcaaaatttaaccaaatattgagtaccatattatttacccaagactccatcctgaaaatttatcctatcctttaaaaagtgcaggatcaaaaaaaaaaaaaaaacaaactaatctgaaaaggattctaagaaaaaacaagcaaatatctgtagattctcaagatactttcccagaaatgcctgtgcactacataaaaaactggcagataaaatatttcttacaaaatgcaaggaacagtctgccagagaactcaaaatattttgtgtatagattacagattctcagttctcacaagatctccactaagtagatactgcactaattacactttgctaactaggcaaaaaaggatcctgcctcagcactagaatcttctatcaattccctacattttaattccgtgcaatcttaaaaataattgttctatatcctctgaaaccaagaactgttctatcatctctgaagacctaaatgaccgctagtgcaagacagctaaagtatctataatatcaaaactctcagcatgtaagacggaagtacttcttccatttgcattattatggatttgccagtaaatcagtgcactgaagccagaagcacaatatatgtgctttttgtttgattctataaataatagattatataccttaaataaaagattgtacgactcaaatagagaacttaagtttttctctttttttgtttagatgtgtctcactctgtcacccaggctggagtgcagtggcacaatctcgactcactgcaacctctgcctcctgggcttatgcgatcctctcacctcagtctcctaagtagctgggactacaggcacgcgccaccaatcccagctaattttttgtatttttagcagacacagggtttcgccacattgcccaggctgagaacttaatttttacaggctcataaatgttagtacttaactgccaagatttctcagaaaaaattttaaaagatctctggatctcaaccaatgttatttctctgtgctttgcatatacagtcaaaagttattgtcaaggtaattaacagagaaaaaagcaggcaattcccacaaatagaaaagtaaaacactataacacaaaacggggagaaaacctatttaagtacatgaaacctgaggtaagcacacatttaaacaccatatagtcacttaccttcactgaattcatttagcaactcttccttggtccaattacatgacgttattagaaaaaagccttttactttcaacaccctggagagagatttcacatattgcttcctcttctcaattgcattgtcaggattaaggcttatggcatcaaaagtccctttgtcaatacaaatatgaaatccagacagctgtgtggagagattcaaaaagtcttctacctatattaaaagtcaatgtctatgtgagaacaattaaaacaaaatccttacagaatgtaagtgacaacctgtaaaaggttattaataaaaggacccattaattataatggcattttacatataataaacatattttcaactttatagctaacttttatgagcttcagtccaagatcattaaagccaagattaataagagagactggtatttcctgaacattccaaatctctacaaatttggaaacaaatcaaagctagccatattccctaataataccagcacattatggagctcacaagcctagtttatgaaaaacctgtttctgtcaaaaagtagaaaatttgacatattcttaaaaatgacaatttatttggaactaagttcactggaaataagatttcttgaagacaggagtcttgctatgttgcccgggatagacttgaaaacctgagctaagcaatcctcccatctcagccttcctaagtagatgtggccacagcactcagctatgggaataagatttttaacttatattcctagtgtgtaacctaaaataaacacggtagatcaaaagttcttgggccttggctggtctgagtgcagtggtgtttacaactaatcgatcaaaaccagttacaaatttattccttccttctctattatcactgcttcacttgaccagcctttaaaaaaaaaaaagaatttcttgggtcttgactaagcagcttacgaaattactaatggatataatgaatggcataaggcttaagaaattaaataactgttaaactgtaattacttcagttggaggtgtgaagtcatacatcaccatctcattcactgttaataacctgatgcatactaagcatcggaaatagcaatccgcctcaattttataaaatattcacaatttaccaatgaaaattctgaaaactcattttgaaaaaaataattaggcaattagctcacaattattcacacacatttaatacagcaattgtaaatcatgtttaatctaaaactctattgacttaaaaatgtatatattatgttgatgtatattggaaggtgggtcttctcccttccttcatgtccaaagtattcattatacctgaagcaaaataatgactatcactctgaagagctaactttgaagaggcttcctcatcctaaatgcctatataaaaatactcatctattcagcaaatattttgtggacatctattgtcaggtacttttcagaccctggatataacagtaaacaaaacagagccaggcgcagtggctcacgcctgtaatcccagcactttgagaggccaaggcaggaggatcacgaggtcaggagatcaagaccatcctggctaacacggtgaaatcctgtctctactaaaaatacaaaaaattagccaggagtggtggtgggcgcctgtagtcccagctactcggcaggctgaggcaggagaatggcgtgaacccgggaggcagagcttgcagtgagccgagatcacgccattgcactccagcctgggaaacaaagctagactccatcttaaaaaaaaaaaaaaaaaaaaaaacagtaaacaaaatagaaaaggtccctgtatgaaaacataccttatattggccgggcgcagtggctcacgcctgtaatcccaacacttagggaggccaaggcagacggatcatgaggtcaggagatcaagaccatcctggctaacacggtgaaaccctgtctctactaaaaatacaaaaaattagccgggcgtggtggcatgtgcctgtagtcccagctacttgggaggctgaggcaggagaattgcttgaactgggaagcagaggttgcagtgagcagagatcgcaccactgcactactgtctaggcgacagggcgagacactgcctcaaaaaaaaaaaaaaaagaaaagaaaagaaaagaaagaaaatataccttatattctacaaagagaaagataaaagataaataagctaaataagtaacttcagataaagtgccatgaagaaaataaagccagagaaataagacattaagtgacttggaagagaaacagtttggaaaagagtagaaacttttcttggccaggcatagtggctcacacctataatcccaacactttgggaggccgagacgggtagatcacctgaggtcaggagttcgagaccagcctgaccaacatggacaaaccccgcctctactaaaaatacaaaaattagctgggcgtggtggcgcatgccagtaatcccagctaatcgggaggctgaggcaggagaatcgtttgaacccaggaaacggaggttgcggtgagccgagatcacgccattgcactccagcctgggcaacaagagtgaaactccatctcaaaaaataaaaacaaataaataaataaagttttctctaaggtgttatttgagcaaagatctgaattatgagaatgaaccaaacatgctaagatctggggcaagaatactctaggcagagggcagcaagtatacagactcaaaacaagcttgacatgtttcaggaacagaagaaaagccaatgtgaccgagtattgatgataaacgaggaagaaggtaagaaatgagggactttgtaaggctggatgaggttcagaatctatttacaatgcaatggggaagtcagttcaggattgtgagcaaggaagcgacatgaacagacatttttaaaaatctggccagggctgaacacagtggctcatgcccataatcccagcactctgggaggccaaggtaggtggatctcttgaggtcaggagtttgagaccagcctgaccaacatgttgaaacccggtctccactaaaaatacaaaaattaggccgggcgcagtgactcacacctgtaatctcaacactttgggaggccgaggcaggcagatcaccttaggtcgtgagttcaaggccagcctgagcgacgtgctgaaatcccatctctactaaaaaaatacgaagaaaattagctgggtgtggtggtgcatgcctgtagtcccagctacttgggaggctgaggaatgagaattgcttgaactcaggaggccgaggttgcagtgagccaggatggtgccactgcactccagcctgggcaacagaaaaagcctccgtctcaaaaaataacaaagaaaaaatcactctggctgccctgtggtaaaagaacatcagagcagcatgagtggaaatggaggggcaaaatcaaaggctactgtagtagtttaaacaagaaataatggtggttcggacttcacagggagcaattgagataacaagaaatgatcacattcttgatatattttgaagataaaactggccagaagcagtggctcatacctgtaatcctagcactttggaaagcagaggcaggcagattgtttgaggccaggaattcaagactagcctgggcaacatgacaaaaccccatctctacaaaaaaattaggtgtggtgaagcaggcctgtagtcccagctactctggaggctttggtggaagaatcacttgagcccaggagattgaggctgcaatgagctgtaataacaccaccgcactccagcctgggctacagggcaagacactgtctccaaaaaaaaaaaaaaaatatatatatatatatgtgtgtataaataaaacgaacagaattggatataggactttaaggaaaaagaagaatcaaggatgactccttgggttttgtgtaaatgcaacagggtaaatgggagtgttattagtagaaacgggaaagactggggaaatcaggtctgaggaggaaaccaagagtttcattttggactaattaagttgagagactattagctttccaaatggaagttttgaacaggcagattttacaagcatccctcagagatattgcaagttctgttccagaccaacacaacaaagcaaacaccacaatgaagcaagtcacacaaaatttttggtttcccagtgcatatagaagttatgtttacactgtattacagtctattaagtgtgcaatagcattatgtctttttaaaaaatgggtgccttgccaggcatggtggctcgcacctgtaatcccagcactttgggaggccaaggtgggtggatcacctgaggtcaggagttcaagaccagcctgaccaacatagtgaaaccccatcgctactaaaaatacaaaaattagccgggcatggtggcacatgcctataatcccagctactcggaggctgaggcaggagaatcgcttgaaaccgggaggcagaggttgtggtgagccgagatcacaccattgcattccagccagggcaacaagagcgaaactccatctcaaaaaaaaaaaaaaaaaaaaaaaaattgggtgccttaaaaaatactttattgtaggccaggagtggtggctcatgcctgtaatcccaacactttgggaggccaaggtggagggatcatctgagatcaagagtttgataccaccctggtcaacatgatgaaatctcgtctctactaaaaaaatacaaaaatggccgggcgtggtagctcacacctgttatcccagcactttgaggggccgaggcgggtggatcacaaggtcaggagttcaagaccagcctggccaatatggtgaaaccccatctctactaaaaatacaaaaattagctgggtgtggtggcgggtgcctgtagtcccagctactcgggaggctgaggcaggacaatcacttgaacccaggaggcggaagttgcaagtgagccaagatcacaccactgcacttcagcctgggtgacagagcaagactccatcccccacaaaaaatactttattgttaaaaaaacactaacaagccatcatcgaaatcatgagtaagtcataatcttttctctggctggagggccttgcctcaataaggatgcctgctgactgatcaaggtattggttgctgaaggctggggtagctgtgaaaatttcctaaaataagacagtaataaagtttgccgtatcgactgattcttccttttatgaaaaatttctctggagtacatgatattgtttgatagcattttacacacagcagaacatccttcgatattggaggcaatgctctcaaaccttgctactgctttatcaactaagtttatggaatattcaaaatcctttttcaacaatgttcacagtagattccatctcaagaaaccactttctctggtcgtccaccataagaagcaactccttatctgatcaagttttatcaagagactgtagcaactcagttacaccttctggctccacttctaattctagtttgctactaccactgtatttgcagttaattcctccattgaaatcttgaacctctctccaagtcatccattaaggttggaatcagcttcttccaaactcctgttaatgttgatattctgacctcccatgaattataaatgttcttcacgacaggcagaatggtgaatcatttccagaaggttttcttttttcttttttttttttgagacagagtcttgctctgtcgcccaggctggagtgcagcggctagatctcagctcactgcaagctccgcctcccaggttcacgccattctcctgcctcagcctcccaagtagctgagactacaggcacctgccaccacacctggctaattctttgtatttttagtagagatggggtttcaccatgttagccaggatggtcttgatctcctgaccttgtgatccgcccaccttggcctcccaagatgctaggattacaggcgtgagccaccgcgcccagcccatttccagaaggttttcaatctactttgcccagatgcatcagacgaatcactatctatgacatccatagccttatgaaatgcatttcttaaataacacatttaagactgtaaagtcgaaattactccttgatccatcacgggctacagaacagatcctgtgttaacaggcataaaaacaagattaatcggctgggcatggtggctcacgcctgtaatcccagcactttgggaggccaaggcaggcggatcaccaggtcaggagatccagaccaccctggctaacacggtgaaaccccatctctactaaaaatacaaaaaattagccaggtgtggtggcaggcacctgtagtcccagctacttgggaggctgaggcaggagaatggcatgaacctgggaggcagagcttgcagtgagctgagatcgagtcactacactccagcctgggtgatagaacaagactccgtctcaaaaaaaaacaagattaatcttcttatatatctccatcagagctcttgggtgaattcatgcattgtcaatgaacagtaatactttgagtctttttcttttggggcagtaggtctcaaaaatgggcttaaaatactcagtaaaccatactgtaaacagatgtgccgttatccaggctttgttgttccatttatagagctcatgcaaagaagatctagcataattcttacgggccctcagattttcggaatgggaaatgggcattggcttcaacttaaagtcatcagctgcattagccccctctaacaataatgtcagcctctcctctgaagatttaaagccaggcactgacttctcctctctagctatgtaactcctacatggcatcttcttccaatataaggctatttcatctccattggaaatctgtgtgttgtttagccagcttcactggttatttcctagctaacttgctacaccttctaccttctacatcagtacttagtgctttatcttgcacttttatgtcatggagatggcttcttttctttttcttttttttttttttttttttttttttgagatggagtctcgctctgttgcccaggctggagtgcagttgcgcgatcttggctcactgcaacctctgcttcccaggttcaagcggttctcctacctcagcctcccaagtagctgggattacagacacccaccaccatgcccagctaactttctgtatttttagtagagacagtttcagcatgtcggccaggctggtcttaaactcctggcctcaggtgatcctcccaccttggcctcccaaagtgctaggattacaggcgtgagccactgtgtccagccaagatggcttctgttcttaaatctcatgaactaactactgctagcttcaaacttttcttctgcagcttcttcacctctctcagccttcacagaattgaaaagagtcaaggccttgctctggattaggctgtggcttgagagaatgctatggctggtttgatcttctatctggagcactaaaactttctccgtaacagcaataaggctgtttgactttctcatcattcatgtgttcactggaataccacttttaatttccttaaagaaattttgttttgcattcacaacttgactaaattttgtcacaagaggcctagcttttggcctatcgcggttttcaacatgccttcctcactaagcttaatcatttctagcttttgatttagagtgagagatgtgtgactctacctttcaactgaacacttacaggccactgtgttgaggtgggggttgtttattttttatccttgtttttttatttttgttttttgagacgcagtctccccgtcacccaggctggagtgcagtggcacaatcttagctcactgcaacctccaccttccaggttcaggcaatcctcctgcctctgtttttttttaaaacagtctccctctgttgtccaggctggagtgtagttgggactacaggtgcccgccaccacacctggctattttttgtacttttggtggagatatggtttcaccatgctggccaggctagtcccaaactcctgacctcaaagtgatctgcccacctcagcctcctaaagtgttgggattacaggcattagccactgcgcctgtcccactgtaaggtttttaattggcctaatttcaatattgctgtgtcccaagaaagaaggaggcttgaggaggagggaggaagataggagaccagccagtaggtagagcagacagaacatacatttatcaattaagctcaccatcttacgtgggcacagttcatggcacgccaaaacaattacaatagtaatatcaaagatcaatgatcatgaatcaccataacagataaaataataatgaaaagctctgaaatattacaacaattaccaaaatgtgacacacagatacaaagtgagaacatgctgttgaaaaaatggtgtcaacagatggggctcaacaggcttgccacaaacctttgatttgtcaaaaaacataccatttgggaagccaaaaaaacagggcatgcctgtctataactctagagctgagaagagaggcctgggctagaaatgtaaatttaggaatcatcatctcacagatcataggacacaaaaataaactaaatgatttttggtgacattataccacttgatgcatttaaaaccttttgatgtgggcagggcgcggtggctcacgcctgtaatcccagcactctgggaggccgaagcgggcagatcacgagatcaggagatcgagaccgtcctggctaacacggtgaaaccccatctctactaaaaatacaaaaaattagctgggcgtggctgcaggcgcctgtagtcccagctacttcagaggctgagagaggagaatggcatgaacccaggaggcggagcttgcagtaagccgagatggcgccaccgcactccagccctccagcctgggcaactgagcgagactcagtctcaaaaaaaaaaaaaaaaaaaaaaaaaaaaaaaaaaaacccttttgatctggttaatccatagttaagtattatgtgtatttgcaaacatcaggagcagtagtgtatgaacaaacatacagaagaaaaaataatttccccaaaccaactagattaaatttttaatatggctatttaaaaatgtttcaatttgtattatttatgattgatccctaatttatgagtttaaaacctgtcaattaatatgctctagaaacatttaacctctattgtaaatattatagtaatataaataatagttacctttaacttaatgttagataaaccttctttttctataatacttccagaaagctgaattgcagaaggagagtaatcaattccagtaatattagagaaaccaaattttgcctagagagaaataattttatactttagtataaaattttaatataatgttttgtttatgaattataatattcctttaggactggtgatgtcttatttttgatgtagagaaaatgacatataatccaattcataatgcttaaattttattgtagactctaaataaaaactgaaagtgtatatactatgacaatacctttgttttcataatattttatctctttttcaaaaggaaattcatgttctcaaaaataatgaaaatatatgtataagccctcaggcaaaaaaaggtaacattaacttttgatgctgataatttccaattcacacataaatttgtcatatattttacttaacccaattaaattatattaacaaaatcaatgcaaatgtaataagctatcaatttttaaattttcccttcagtgtaattatacattatgcaattctccaccagccatgtgatttttaaccattctacatttgtatactacttttacgtctttaaaaatatttcatacatcccattagatctttacagaaaacctgtgaggtagggtgggcaggtatcagtatccccaagaagtttctttaactcaatggacttgagagttttggtgtttgctagccattaacccatctaggctgtgtagtgtctatggcaaaagcatggaagcttctggtctttacacaccccctaacaacactaaacatttttagaccaatgagactaaaaataatttcaaaggaaacatgaaaaacaaagtaagttacaaagtacagtatagcctgaaattcccttcctgctcttcaccatttactaaatggttacttcctttaaaacttaacctactgccacatcaaatccatgaagacctaccaagtctttttaaccctaagtaactgattcctaatctaaactcaaggaacaagtataccaattactttctacaggtagattgctccctttatttttgtttttaatctaaaggtctaatattctcttttttgatgccaaccttccacccttttagctgtatccctccttattccttgagattttctccccatttcccttaactgcttctctgggagacctagaacccaggatgagtctattaactgattcttaccggttccttctttttttttttttgagacagagtctcgctctgtcgcccaggctgcaatgcagtggcacgatctcggctcactgaaagctctgcctcccgggttcacaccattctcccacctcagcctcccaagtagctgggactacaggcgcccgccaccacgcccagctaattttgtttttgtatttttagtagagatggggtttcaccgtgttagccaggatggtcttgatctcctgacctcgtgatccgcccacctcggcctaccggttccttcttttcccatgcctgtttattcttctagtacaacttataaaaatcacaaatagatgttttaggtttctagagatatcactcagggcctcaaactatctccaatgtctttcacattcaatttctggcacccaaaaatgagcagacattcaaggaaacaaccaaacccaaggggagaaattgactttagaaacagacccgacaggagacccaaataaatgaattttcagaaaaagatttcaaaacaactgacagaaatgacaatgacaagtgggagaattctagcagagaactgaaaaccacaacagagaaacaaacagggccagacacggtggctcacgcctataatcctagcactctgggaggcggaggcaggcagaccacctgaggtcaggagttcaagaccagcctggccaacacggtgaaaccccatctctactaaaaacacaaaaattagccaggctaattttgtggtggtgagtgcctgtaatcccagctactcgggaggctgaggcaggagaattgcttgaacccgggaggtggagtttgcagtgagccgagatcatgccactgcactccagcctgggcaacagaacaagactcttgtctcaaaaaaaataaaataaaaaataacataattgaaaaatacagtaattaggaagttcaagggtgggcttgatagcagactacacacagcaaaaaataaaaaaaaaatcagcaaagaacagtcagaagaaaatatccctgttatacacagaatgacaaaagaatggaaaattaaaaacaggaaagaatatcaaagacataatatgggccgggcatggtggctcaagcttgtaatcctatcattttgggaggccaaggcaggtggatcacctgaggtcaggagtttgagaccagcctggccaacacggtgaaacccctctttactaaaaatacaaaaattagctaggcatggtggtgggcacctgaaattccagctactcaggaagatgaggcaggagaattgcttgaacccaggaggtggaggttatagtgagccaagatcgcgccattgcactccagcctgggctacaagagcaaaactctgactcaaaaaaaaaaaaaaaaagaaaaaaagacagaatatagcacagaatataagatgtaacacatacacacacacagtcatgtgtcaccatggagtgtacttacaaaaacctaaatggtagagcccactgcacacttaggctacatggtatggcttattactcctaggctacacacctgtacagcattttactgtaccgaatactggaggcaactgtagcacgatggtatctgtgtacctaaagattttttttttttttttgagacagggtctcactcttgtaagtcaggctggagtgcagtagcacaatcatggcttactgcagccttgcctcctggctcaatcaatcctcccaccccagcctctcaagtagctggataggctcatgccaccaccatgcctggttaatttttgtttttttgttttttgtttttttttgtagagacagggtttcgccaggctgcccaagctggtcttgaactcctgagctcaagttatccacctgccttggcctcccaaagtgctgggattacaggcatgagccactgtgcccagccctaaagatatctgtacatagaaagggtaaaaatacagtattataatcttataggaccaccattgtatatgtggtacatttcaactgaaacattgttatgtagtgtatgactatatatacatacacacacacacaaccctctatatccacaggggttcgagaccagcgtggccaacatggtgaaaccccatctctactaaacacacaaaattagccaggcgtggtggcgggtgcctgtaatcccagctacttgggaggctgaggcaggagaatcgcttgaacccaggagttggaggttatagtgagctccggagttggaggttatagtgtgtatgtatagacaattttaacacacagtctatacatacacacacacacacacatacatacacacaaacatatatgtatacccaatccatatgtggaatctgagaggaaaggaaatgagaatagggcagaagaaaaaatggcatatggctaagaatactccaatagtgacaaaggacccaagcctcagattcaagaaacagtataaattcaaggcagatgaaagcaaactccacctagacacatcatagtgtatctgatgaaaaacaaaaacagaaaaatcagctcagcatggtggcttatgcctgtaataccagcactttgggaggccaaggcaggcggatcacctaaggtcaggagttcgagaccagcctggccaatatggtgaaaccccgtctctactaaaaatacaaaaattagccaggtgtggtggcacatgcctgtaatcccagctactcgggagactgaggcaagagaatcacttgaaccccggaagcagaggttgcagtgagcagagatggcacatggcactccagcctgggtgacggcgtgagactccgtaccaaaaaaaaaaaaaaagaaaaacagaaaaatctcaaaaacatccagggagtagggatgtgggatacaaggcgacagattacctttaaaaggatgatgataaggcttatagctaacaataagtgataaagaatggaagccagaagatagtaaaagaaaaatagtaacctaaaatgatatagcaaaaacatccatcaaaaatgtaggaaaagtaaccatcaaaaatgtagctgatcaatgaaaaagtagtacgtataagaaatggtcttcaatggctgttaatataacaaaaagatgaatgttctacaccaaatattctacgccacatatgcaaatatacaccaacacctaataagtttacttgccaaaaaaaaaaatctaataaaaatctctcaatccagggtcagcaatctttttcttttttttatggaaacagggtttccttctgtcacccagactggaatgcaacagcgtgatcacagctcactgcagcctcaacctccccaggctcaagcgattctcccacctcagcctcctgagtaactggaattacaaggacacaccacgacacctggctatttttctgtgtctttagtagacacggggtttcaccatgttgcccaggctggtctcaaactcttgagctcaaacaaaccttccaccttggcctcccaaagtgctgggattataggtgtgagccaccatgcccagccagcaaccattttctataaagaaacagaatagtggctgggcgcagtggctcacgcctgtaatcccagcactttgggaggccgaggcgggtggatcacgaggtcaggagatcgagaccatcctggctaacacagtgaaaccccgtctctactaaaaaaatacaaaaaattagccggacgtggtggcgggtgccagtagtcccagctactcaggaggctgaggcaggagaatggtgtgaacctgggaggtggagcttgcagtgagccaagactgcaccactgcactccagcctgggcgacagagcgagactccatctcaaaaaaaaaaaaaaaaaaaaaaagaaacagaatagtcaggcgtggtggctcacgcctgtaatcccagcactcttggaggccaaggtgggtggatcctgaggtcaggagatcgagaccatcctggctaacagagtgaaaccccgtctctactaaaaaatacaaaaaattagccaggcgtggtggcgggcacatgtagtcccagctactcgggaggctgaggcaaaagaatggtgtgaacccaggaggcagagcttacagtgagccaagatcacacgccactgcactccagcactccagcctgggcgacagagcaagactctgtctcaaaaaacaaaaagaaacagaataaatattttaggctttgccagccatacagtctctgttacaaccagtcaactctaccaatgcaacacttaagctgccatagacaatatgcaaatgaataaatgtggctgtattccaacaaatatttataaaaacaaaggaggtccagatttgacccgtagactgtggtttgctgacccttaatttaggtctaatttccaacgtacagacaacacgagggacagaaaacatgttaaatactatagagatgtaattagaaaattcacattgtgaaaaaccattcagacaaatgaactacctcctacaaaaaataaatcgtaatggtaaataaagaaatcatgcagtaaaaaattaagacatgtcagccaattgcaatgtgtggacttaacagcaaaatgaaggtgacagagaaaaagtcagtgaatctgaagacagatcaattgaaatataacatttggccgacaaagacaaaaatgacttttaaaaaattgaacctgtggagttcacggggacctgtggagcaacagaaaaattgacatttcatgtgtatagactcccaaaatgaaaggagaaagacagtaatacagaaaaaaaaaatagaaaaaacaaaagctagaaatatcgcaaatctggcaaaagacataagcttacagatgtaaaaagttcagtgaacaccaaataggataagccaaagaaatccaagccacagcacacatcataagcaaactgcaaaaaacaaaagacaaagaaaaaaaatcttaaaagcatctagaaaaatgatgcattcataggaaaacaacaattcaaatgactgcagattcctcatgagaaaacatggaagtcaaaaacaagtgacgtaactttttttttttgagacggagtcttgctctgctgccaagctggaatgcagtggcgcgatcttggctcactgcaacccccgcctcccgggttcaagctattcccctgcctcagtctcctgagtagctgggactacaagggcatgccaccacgcccggctaattttttgtattttagtagagatgggggtccaccatgttggccaggatggtctcgatctcccgacctcgtgatctgcccgcctcggcctcccaaaatgctgggattacaggcgtgagccaccgtgcccagcccataacatttttaaagtactgaaagaaacggctagctcagaattctatattcaggccggctgcggtggctcacgcctgttatcccagcacttttgaaggctgaggcaggcagatcatccgaggtcagaaattcgagaccagcccggccaacatggtgaaaccccatctctactaaaaacacaaaaagtagccgggtgtggtggtggacacctataatcccagctactcgggaggctgaggcagaagaatcaatcgcttgaacccaggaggcgaaggttgcagtgagccgagattgtgagattgtgccactgcactccagcctgggtgacagagtgagactgtgtctcaaaaaaaaaaaagattctatattcagccaaaaaaaaaaaaaaaacactccttaggaatgaaggtgaaataaagctattctcaggtaaaggaaaacaaaaaaaatttgttgcaagaaaaccctctctaaaataatttccaagaagaatttcttagacagaaagaaaaaaaaaaagctcaggagatccagaatacaaaggtgaaataaatatctaggtgaatataattaaatattcttctcctagtgcattccttaaaatgtttgaaaaaaatcataatattatctaatggaattttcaacataaaggtaatagtaaagacaactacaacataaaggtgaaagatcaagaacccaacatgataaggttttcacattccacttatagtggtaaaatactgattccaaggagattttgacaactatatatattgtaatctacacaggaaccactagaaaagccacaccaaaagacacagtcaactgcttaaagcaaccactaaaacagccatacgcaaagagatatattcaagaagatacacataaattaaaatgaaatactaacaaatgttcaaataaaccaacaccagcaggaaaggaaaaagagaagaataaaaaacagaggtaaggccaggcacagtggctcaagcctgtaatcccagcacaaagggaggctgaggcgggcagatcacctgaggtcaagagttcaagaccggccgggtgcggtggctcacgcctgtaatcccagcactttgggaggccgaggcgggaggatcacgaggtcaggagatcgagaccatcctggctaacacggtgaaaccccgtctctactaaaaatacaaaaaattagccgggcgtggtagcgggcgcctgtagtcccagctactcgggaggctgaggcaggagaatggcgtgaacctgggaggcggagcttgcagtgagccgagatcgcgccactgcactccagcctgggcgacagagcgagactccgtctcaaaaaaaaaaaaaaaaaaaaaagagttcaagaccagcctggacaacagggcgaaaccccgtctgtactaaaaatacaaaaagtagccgtgtgtggtggcgggtacctgtaatcccagctactcagggaggctgaggcaggagaatcacttgaacccaggaggtggaggttgcagtgagccaagatccctccattgcactccagcctgggcaacatgagtgaaactctgtctcaaaaaaaaaaaaacagaggtaaaaaagggaaaacaataaaatgtagacctaaatccaaacgtatcaataatcacattgaacataaatgttctaaatacaccagttaaaggttagagattgttagaatagataaaaataactaccaactatatgctggctacaagaaattcacttcaaatataataataaggtaagttaaaaggatggaaaacaatataacatgtaaaaactaaacaaaaaggggctgaacatcatgtccactaggatggctataatttaaaagatagataataaaaagtattggtgaggatatagggaaaaacctttttttttttttttttttttgagacagagtcttactctgtctcccaggctggagtgcagtggggccatctcggctcactgcaacctccacctcccaggttcaagcaattctcccacctcagcctcctgagtagctgtgactactcaggcaaacaccaccacgtctggctaatttttgtatcttttggtagcgacagggtttcaccatgatggccagggtggtctcaaactgctgacctcaagtgatccaccggccttggcctcccagagtgctaggattgccggcataagccactgtgcccagccaagaatatggagaaatttaaactctcatgtattgctgatggaaatttaaaatggtgcagccactgtggaaaatggtccagcagctccttaaaaggttaaacttaccgagtatgcttaactggcgtatgacccagcaatttcactcctaagtaaatacccaagagaagtgaaaacatatgtacacacaaaaacttacatatgaattttcctttgtttttggagataaggtctcactctgtcacccaggctggagtgcggtggcataatcatggctcactgcagcctcgacctcctcaggctcaggtgatcctcccacttcagcctcccaagtagctgggactacaggtgcacttgccaccaaccaaacctggctaaattattttattttattttattttgagacagagtttcactctagttgcccaggctggagtgcaacggtgcaatctcggctcaccgcaacctccgcctcccaggttcaggtgattctcctgcttcagcctcccgagtagctgggattacaggcatgcaccaccacgcccaaccaattttatatttttagtagagacaaggtttctccatgttggtcaggctggtcttaaactcctgacctcaggtgatctgcccacctcagtctcccaaaatgctgggattacaggtgtaagccaccacacctggcaatacatacatttttcaagttcacatgaaaaattccccaagacacactgtatcttgggtcttaaaacaaaccttaacaaatttaaaaggattgaaatcatacaaatcatataaggcatgttatctgactataactgaattagactataaatctgtaccagaaacataacagaaaaatcccaaaaacatggaaattaaacaaatttctaaataactcgtggattaaaaaaaattagaaaaattagaaaatattttggactgaataaaaatacaacaaatcaacaatttaaaaaaaaattcaagtgaggtgtagaacaattttttaaaatataacatatcaaaatttgtgggatgcagcagtgcttactgataaattcatagcattcatagcattaaataatttcattagaaaagtctcaaatcaataacctaagcttccaccttaagaaagtaaaaaaaggaacaaagtaaaatcaggaagaaaaaaaaaaagaacagaactcaatgaaattaaaaacataaaaataggcagggcagggtggctcacgcctgtaatcccagaactttgggaggccaagatgggtggatcacctgaggtcaggagtttaagaccagcctggacaacatggtgaaacgctgtctctactaaaaatacaaaaattagcggggcatggtgacacacacctataatctcagctactcaggaggctgaggcaggagaattctttgaaccccaaaggcagaggttgaagtgaaccaagatcacaccactgcactacagcctggaagacagagcaagattccatcttaaaaaaaaaaaaaaaaaggtctaaatgtaaaaggtaggctgggcgcggtggctcacccctgcacccccagcactttggggagccaaggggggaaaatcacgagatcaggcattttagaccatcctggccaatgtggtgaaagcccatctctactaaaaatacaaaaattagccaggcgtggtgttgcgctcctgtagccccagctactcgggaggctgaggcagaagaatcacttgaaaccaggagacagaggttgcagtgagccaagatcatgccactgcactctagcctgggtgacagagcaagactccgtctcaaaaaaaaaaaaaaaaaaaaaaaagaatgtaaaaggtaaagtgttaaaactttaaacaaaaacacagaagaagttctaagtgaccctgtgttaggcagagtcctttaatactacaacaaaagcatgatccaaaaaaggaaaaaattaattggacttcatcaaaattaagaactgctcttcagaagatactgttaagtgaatgaaaagataagccaaagaatagaagaaaacatctgcaaatcttgtacctggtgaagaacttatatccagaatacgttaaaaattgtcaaaacttaataagtaaacaatccaatttaaaaatgggcaaaagatctgaagagacattttactaaagaagataaacaggccaggcgtggtggctcacgcttgtaatccaagcacttcaggaggccaaggtgggtagatcacctgaggtcaggagttcgagaccagcctagccaacatggtgaaacgctatgtctactaaaaatacaaaaaaattagccaggcgtgctggcgcgcacctgtaatcccatctactcaggaggctgaggcaggagaatcacttgaaccctgcaggtggaggttgcagtgagccgaggtcatgccactgcactccagcctgggcaacagagcgagactctgtctcaaaaaaaaaaaaaaaaaaaaaaagatacacaagtggcaaacaagcacctgaaaaggtgctcaacatcattcattactcattagagaaatgcaaattaaaaccgtaagaagctactacagttaatatcaaaaacagcctactatatgatgatagaagtgacagcagtggtcacctttagaagggaaggagtgggaggggccacaaggaagctcctatggtactagaaatgtcttattttttggtcaggttggtgaataacacaaggggttcattttgtaccacttatgctcacctttctacataaactacacttcaattaagaatttcagggccgggcgtggtggctcacacctgtaatcccagcactttgggaggccaagacgggcagatcacgaggtcaggagatcgagaccatcccagctaacacagtgaaaccccgtctctactgaaaatacaaaaaattagccaggcgtggtggtgggtgcctgtaatcccagctactcaggaggctgaggcaggaaaatggcgtgaatccgggaggcggagcttgcagtgagccgagatcgccccactgcactccagcctgggggacagagtgagactccgtctcaaaaaaaaaaaaaagaagttcaggccaggcagagtggctcacacctataataccagcactccgggaggctgaggcaggcagatggattacctgaggtcaggagtttgagaacagctggccaacatagcagaaccccatctctactacaaatacaaaaattaaccaggcatggtgtacgcctgtaatcctagctactcaggaggctgaggcaggaaaatcgcttgaacccaggaagcagaggctgcagtgagctgagatcgcaccactgcactctagcctgggctacagagtgaaactccatctcaaaaaaaaaagaaagaaaaagaaaagaaaataatctacaagctattaatctcaaagtataaatcattagcctctaccagtaaactattaaaacccaaaagaacctatacaggtaaagaaagaataaatgaaactgatataattgtacaaaagaatttttttttttttttgagacggagtctcactctgtcgcccaggctgatctccgctcactgcaaactccacctcccgggttcacaccattctcctgcctcagcctcccgagtacctgggactatatggcgcccaccaccactcccggctaactttttgtatttttagtagagacggggtttcaccgtgttagccaaggcatggtctcgatctcctgaccttgtgatccacctgccttggcctcccaaagcgctgggattacaggcatgagccacagcgcccagccacaaaggaatcttatatggcaataaaaatgaactacatagcgaggcataatggcgtgcgcctgtaatcccagctactcatgaggctgaggcacgagaaccacttgaacccaggtggtgaaggttgcagtgagccaagatcgtgagactgcactccagcctgggtgtcagagccaagactctgtctcaaaaaaaaaaaaaaaaaaaaaaaagcctgaaagacaccaggaatagcacaccctaaagagtttcatttataccttcaaaaacaggcaaattaatctgatgttaaaactcatcttttgttcatgattggtagatagtggttacttttaaaaaggaaggagggccagcctgggcaacatagtgaaaccttgtctctacaaaaaaaatcaaaatatgaggcgacaggatcgcttgagcctgagaggttgaggctacaatgtgccatgatctcaccagtgcactcctacctgggtgacaaagcctgaaaaaaaaaaaaaggaagaaaggagtaataattggtagagagttcaaggggaatttctagagttctataatattttacatcttgaccaggtgattgttatgtggatgtattcactttctgataattcacttagctgtatacttctgatttgtgcactttaatgtacacacactatatctcaatgtttcaagaagggttatttcaagttcttctaatcatattccactactaaaaacattttaacaattccccatagcctaaatgcaaaatcgaaggtcttaagcatggcaaagcataatatggttcctatctttaacttaatcctcatgtctgtccatccccacgtatactttgtatttcaatttatcaaattatttacaggcccagaacataaaatactgcttcagccttcaggcctttagataatatttccattagttgaaatcttctccctctttacacgccactaggtcaccaaactgtccctgaaatttccacccaacttggatatttactcctccaagatgcttccctacccctccactccaaaattaatcaccctcttttctatattcagtgtattactgcatgcatcaagtgatggcacaactgtccatatgtcagtccatactctattgtaatgtaaacaattcaagcacaaagtctaaattttcctgttgccaatgccaaacatgaggcttggcatgtggtggttacttaacaaatttcactcttatgtttatttctgtactaattaagactgtaaaattatctaggatgaagcctaagtcttataattcctccacagcacacagcatagcaagagcacactgcaggcatacaacagtgatggtttagctagcagtggaatgtttaccgaaacacagttccatggacaaaatgcacttttcaaaccatatgcttacctataagataagatacgtatgtcctactggaattgcaaaaggtcatctttatatatatatatatatatgcatttctagagttttgagctacaagaaaccaatagcaatcacctagtcacaacccttaggaaagaacagaagcctagaaaaattaagtggcttactcaaggttaagactatagccaaaagagtcaagactaggactcagattgcctaggttctctcacaatccatgtagcctcccttttgtactatctgacttctccaagtatgactgctttactattttatatttagatggttaatatcctcaattgcagggcctttaaaaattttccttttaaaatttgtctttaacaaacaaatactaaaagtaccaacaagttcaaccaggaaaacaccatttccagttccaatatcaagcactgaagcatccagtggaatcttgtgtttctgcatccaccttattagtcgattcatactctcttctccaaacctgttagagagaatcagtcaaataactgagggatacagagcaaaagtcaccactatattccatttaagctatttataccatatgctcaaactcttatttgaaagtgaaaacatctgtgactgcttcagctttgtctctactgtaatttaggagaaaccacctccaggaatacaacagaatagacaaggtcagtatgttatttactaacatttctctatatcagcattaacagttgtatgtgttggtgtctcagaattttattgtttattgacaaaggacaactatagggtgaaatgctgtcatcaaacgtaaatgtgagatattaaaagagggctcacacccattctcccaacactttggaaggccacggtgggaggactgcttgaggccaggagttcgagaccaccctgggtaacacagtgagaccctgtctctacaaaaaagaaaatttgctgggcatgatggcatgcagctatagtcccagctacccaggaggctgtggcgggaggatcacctgggcccaggaggtccaggatgtaacgagttatgatgatcatgccactgtactccagcctggatgacagaatgacaccccacctctctaaaaaaaaaaaaaaagtaaaaaattaaaaaagaataaaagaagagacatactttaaatctacccactaaagccagacttaatccagggttcccaggatttttaggctttctttgggtataagcacttgaatatatgcatttttttttttgagatggagtctcactctgtcgcccaggatggagtgcagtggcgcgatctcagctcactgcaatctccgcctcccaggttcaaatgattcccctgcctcggcctcccaagtagctgggactacaggcgcgcgccaccatgcctggctaattttttgtctaattttcgtagagacagggtttcaccatgtcggccaggatggtctctatctcctgacctcgtgatctgcctgcctcggcctcccaaagtgctgggattacaggcgtaagccaccgcgcccggcgaatatatacgtatttttttaaacacacacacatatacatataatcttctagattataacttgattcttttcctaactcaccagatttcacctgtatctccatattctcggaaagtttgcagttctctctcatagacagcatcccaactatgtaaacaatgaaatgcaaagcaagactcttgaattaaactgtattatgaattaaatgtatgtttctaatacattacagagctatttatgacagaggtttaaacatcactagtgttattaataaatacacatagttcaatcttttaacgtccttgagttaaaagaaggaaatacatgggcaagcagaatacgtttatactgtacatgtaaagcatttaggacaatatctgatgcacaacaataagttttagcctaaaaaaacacaaagacatttgtccacgtatccctaagtccctgacccaagttcaaaacttgatgaaacaagcacatctggtctcaagtgtgcaggcacacagtctctttcctgtgctatttgtctctgcctattccagtcttctagccctccgtttaaattttctctggacgcttttcttctttttttgagacggagtcacgctctgtcaccaggctggagtgcagtggcgcgatctcggctcactgcaacctccgcctcccgggttcaagcgattctcctgcctcagcctcccgagtagctgggactacaggtgtgcgccaccacaccccgctaatttttgtatttttagtagagacggggtttcaccatgttggtcaggctggtctcgatctcctgaccttgtgctccgcccgcctcggcctcccaaagtgctgggattacaggcgtaagccaccacgcacccggccctctgaatccttttcatttgccgtctcttttcctacaatgattctctagaatccctgctccctctcatcccgccaatttacctctccccaactgttccctgcagccattcatccacccacattaattcatttaataattcctgagcgtctgtttgaggtcagatcgctttctttcaccccaagatcccccactatctccccgctcccgcctcgggtcatccgctattcccaccccacttccagctcccacatccctcccctcctactcagccttttcggctcccaggcccagcacttctccctcggtctctcactctcgccgaccagccctattcgccagcctcgccctctccccctttcccccaagcctggccctcaggttcgagactcccaaaaggcctcccaggagccaaagcctgtcccgcacccacaagccccttgggctccaatcccttgaaacgtcggttaaccgcgtagggcgacccctagggattccactctttgaaatccccgtaagccccccgccaggtggccctgctcccgtcacgcccccgagggtctccctgtccctgagccccgggtctccaccccgccgtccccttctcggggcccaggcagggcggcacggctcatcctcccctgcccagcgtcacactcactgctcgcgggtccccagcgccgacgggacgaaaccgtcctccccgggactgcccttgtccgaccgcgccgccaccgcagcgccaccgccgccgtcagcgcccgagctcatttcgc

SEQ ID NO: 196 - DNA, 15837 bp, Homo sapiens
  source 1..15837: mol_type = genomic DNA
ggctcctcaccccctggtgccccctcttctccaggggtctgcggcgactggaagaaccacttcacggtggcccagagcgaagccttcgatcgtgcctaccgcaagcagatgcgggggatgccgaccttcccctgggatgaagacccggaggaggacggcagcccagatcctgagcccagccctgagcctgagcccaagcccagccttgagcccaacaccagcctggagcgtgagcccagacccaactccagccccagccccagccccggccaggcctctgagaccccgcacccacgaccctcataataaacacgtcgattctgtccaggttccttgatgcgctgtggcagggcaggcagcggggcgtggagaatcctcaccacaccaaggcttccagaggccggggtccccgactcagagtcccgcccagaggcaaaggtgctgcaggaacccagcgctgggcatctcacttcccggggtgggggcctgactccccagtctgagggaggagggggctgggggcctggactcctgggtctgagggaggaggggctgggagtctggactgccgggtctgagggaggagagggctgggggtctggactcccgggtttgaggaaggaggggctgggaggctgcactcccgggtctgagggaggagggtctggaggcttggacccctcagtctgagggaggaggggttgggggcctggactcccgggtctgagggagtagtatctgggggcctggagtctcgagtctgagggaggaggagctgggggcctggacccctgggtctgagggaggagggggctgggttgtggactcttggattcagagccagtctttagtaacgcacgtttttggcataaagtggttttattccgagcagaggtaaacgggagctccggcagacccgccctctcagcgcccacagaaagtcccaccacccaccctgttcccctgtggctgtaccacattccactccctcagtattcagctccttgcctcagtttccccacagctcctgaacacagtgtgcctggcagcgactccccatcttcccctccacagctctagcagctctagctcggggcctcacccgggcccctcatcaggaaggcctgaccctcgggagctgtgtgtgtcttctttaggatccgctgcctggggacgctgccagcccatcttctgggttgtgacactgaggtctggtgcaggcaatgggcttgcccaagtccttttttttgtttgagatgaaatctcgctctgtcacccaggctggagtgcagtggcgtgatctcagctcactgcaacctccgcctcccgggttcaagcaattctcccgtctcagcctcctaagtagctgggattacaggcgcccgccaccacacctggctaatttttgtatttggtagagatggggtttcaccatgttggtcaggttggtcttgaactcctgacctcaggtgatccacatgcctcagcctcccaaagtgctgggattacaggagtgagccacctcgatcagcctttctttttcttttttcttttttttttttttttaaagagatggcctctcactgtgttgcccaggctggagtgcaagggcatgatcttggctcactgctgcctccacctcctgagctcaagggatcctcccacctcagcctcctgcgtagctgggaccacaggcgtgcgccaccacacccaactaatttgtttttttaattgtagagatggggtctcactatgttgcccaggctggtctccaactcctggccttaagcaaccctcccaccttagcctcccaaagtgcagggattacaggcatgagccaccactcccggcccaagttgcagaacaagtgacaaacatcccttctgcttgacagacgccgaggccagaagccttgtccaaggcagggcattgaggcagagggctctgagccgacagttgtccggcactgctccttgggtgggccagcagatttggcttgggctcctgttcagggttgccccccaagtcctgcccggggggcccagtctgacggcctgacgcctctgggctcttgaagtttgaatgtagcatccccaccgaaccgccttcgggctggggacagatagcggaggcggtgggcggggggcaggggcagggcaccgccccacggaggtcgggagtccacttccccccaggggcctcctccagtgccccgctgcctcatcagagccttggctggagtgtccttggagccccaggatttcttgagctgtggagggaaagagagggaggtgagaggaggctggggtggggccctgggggcatcccagatccagggaaggcaggaggtgaggcaagagagaagcagcgaaagtgacagacggccaggcacggtggctcacgcctgtaatcccagcactttgggaggccgaggtgggtggatcacctgaggtcaggagttcaagaccagcctggccaacatggtgaaaccctatctctactaaaaatacaaaaattagcctgaggtggtggtgggcgcctgtaatcctagctactcgggaggctgaggcaggagaatcgcttgaacccggaagggagagattgcagtgagctgagatagcgccaccgcactccagcctgggcatcagaacaagactcagtctcaaaaaaaaaaaaaggaagtgatagaggatttgagggaggtggaaggagatggtggaggagggaagggagggaagagaggagagagggaggagagagatggaggccggacgcggtggctcacaccagtaatcccagcactttgggaggtgggaggattgcttgagctcaggagttcgagaccaacctaggcaacacagtgagacctcatctctccaaaaaatacaaaaattagccaggcgtggtggcgtgggtctgtaatcctagctacttggaaggctgaggtgggaggatcacttgagcccaggaggttgaggctgcagtgagccgagatcatgccactgtactccagcctgggagacagagcgagaccctatctcaaaaaaaaaaaaaaaaaaaaaaaatgggtggaggaggtaaaagaagaggaaggggtaagggagaaggtgagggaggagaaagaaggagaggagggaggaggggagccaggaaggagagagaggagacagagagggtgaaaggggaaggatgaggtgaggaagaggcaggaaggcagcagcaggaggagggacagaaaggagagggatgcagaggaggaagcaggtaaggaggacggtgtggggagcccgagagggaaggggggaagtgagagggcaaacctgggaccccctaacctacagagggacaaggagctgggtccccacctctgcagctggggaggaaccggaagcgccggcatctgccagccgggatcaaatatttgccaagggaggggatgctgggtgagggtgctcaggaccaggtgaaggtaaggaccttgcccctgcccatcccccgtctcctctccagctaggagccttccttgcctgggacggagggagatgattcctgattcccaaggcattgcagagcaagaccctatctcaaaaaaaaaaaaaaaaaaatatatatatatatatatatatatatatatatatatatatatatatatagctttctttggcctgggatgaggatgtcacaaaataaataaattccacttcaggaatgtatttatttattgtttattattattattattattattattattattattattattattttgagacagccttgctctgtcacccaggctagagtgcagtggaacgatctcagctcactgcaaccgccgcctccctggctcaaacgattctcctgcctaagcctccggagtagctgggactacaggtgtgcaccaacacacccagcgaatttttttgtatttttagtagagatagggtttcactatgctggccaggctggtctcgatctccctgtttcaggaatgtattgttgttgtcattactactctatttcatttagccaagtggattcctcccccaaccaaactcggaatgagtgcccttgctctgctccttcctagatgaggataccgaggttcagagaattcaagtcctcggcttccccccacctagtctgtcatgccaggatttgcacccagggctctcctgtctctgccccatgccacccagcgcccacctgcccaaaatgcagcaggcgtgcaggaaatgaacaaacgatgccattatgaatttaggggtgcaggccctcaggaaacgcctgctctggctgggagcagggcccctggagcctggcttgcaccaccctgggcaaacgccttccccttcctgggctccatcttctggcaccagccacaaggtctcacctcgttgtccccatcactggagccagacagctgggacaggcggcttaggtcccacatggagcggctgggccgggccggggggccgctgggggtccgggcgcgctgcacactccttagaatgtcactgagtgccggccccggggtagcaggggagacgcggcaggcggccaggcggtgggccagcgggccgtcaggcggcggaggcgacgcgggggccacggagcggcggcgggacacgcggtgcgggctgcggccccgctgcaggccacctatgaccgagggtttctgggggggcgcaggtgggagcgggcaggaggccgcgtacagcgtccggaactcaaggctgaaggcgtcaacaatttcaccagtcagcagggtcaccaggcctcggtgcaggcgtgcgtcactccacgtgaagctgggggtcggggagtagggggtcagagtctccaaccctgagggcccagcccggcccccatcctcagccaggtcccaggggagaccgtaggacctcaggcgagtcctgacctctccagcctcagcttccctgtctgtagaatgggcacaactgaagtacctactcgggaggggtggagtgaagacagcccaagttaagacacttatataatcagggccaggtgtggtgactcacactttgggaggctgaggcaggagggttgcttgagcccaggagtttcagaccagcctgggcaacatggtgagaccctatctctacaaaaaatcaaaaaaactagccaggtgtggtggcgcacacctgtactcccagccacttgggagactgaggcgggaggatcccttgaccctgggatttttttttttttttttttttttgtgagacggagtttcgctctttttgcccaggctggagtgtagtggcatgatctcggctcactgcaacctctgcctcctggcttcaagcaattctcctgcctcagcctcctgagtagttgggattacaggcacctgccgccatgcccggctaattttttgtatttttagtagagatggggtttcaccacattggccaggctggtctcgaacccctgacctcaggtgatccacccgcctcggcctcccaaagtgctgggattacaggtgtgagccacccgtgcccggctgagcctgggaaattgaggctgcagtgagccgtgataataccactgcattccagcctgggcagcaaagcaagaccctgtccccctcgcccccctcccaaaaaaaaaaaagccagatgcggtggctcactcctgtaatcccagcactttgggaggctgaggcgggcagatcatgaggtcaggagtttgagatcagcctgaccaacatggtgaaaccccatctctactaaaaatacagaaattagctgggtatggtggcacatgcctgtaattccagctactcaggaggctgaggcaggagaattgcttgaacccgggaggtggaggttgcagtgagctgaaatcacaccactgcactccaacctgggcgacagagcgagactctgactcaaaaaaaaaaaaaaaaaaaaaaaacttatctggaatcagactggagtttaaacccaggctctgcctggtccccacttaggaacacctcaatgcctcagttttcccctttggaaagagacggaattcacttccggacactaacagggattgttttaagacccagctgcttcctagaatgactgccatttagtcagtcctggctgtgcaccaagctctccacgttgctgctccctgcagtgctcatctgcaatctggagcaaaaacctaggaaggccgtgtgcagtggctcatgcctgtaatcccagcactttgggaggccgaggcaggaggatcacttgaggctaggagtttgagaccagcctgggcaacatagcaagaccccatctctataaaaaattttacaaaattagccgggcatggtggtgcacgcctatagtcccagctactctggaggctcagggaggagaatcacttgagcctgggaagttgaggctgcagtgagccaagatcgcgccactgcactccagtctaggcaacagagcaagatcctatttttttttttttttgagatggagtcttgctctattgcctaggctcaagtgcagtggcacaatattggctcactgcaacctccacctcccaggttcaagcctcccaagtagctgggattacaggtgcacaccaccatgcccagcaaatttttgtatttttagtagagatggggttttaccacgttggccatgctggtcttgaactcctgagctcaggtgatccacccgcctcggcctcccaaagtgctgggattacaggcgtgagccactgcgcccggccaattttttaaaataaaaaataaaattaagaaataaatacaacataggaatattcaaatgactgaatttgaatcaagccccctgcacgtagctggccctgagagcctgtgagctgtgggggccggtgccctaacacttcctgtcatcacagtagttgttattgaaagcaccaagtgccaggcgtggtgtggtggctcacgtctgtaatcccagcactttgggaggtcgaggcgggcagatcacttgagctcaagagttcgcaaccagcctggcctacatggtgaaaccctgtctctactaaaaatacaaaaattagccagatgtggttgcatgcgcctgcagtcccagccactcgggaggctgagttacgagaatcgcttgaagctgggaagcagaagctgcagtgagctgagatcacgccactgcactccagcctgggtgacagagtgagagactccgtctcaaaaaaataaaagcaagcaagcactgagcatgaatcctggcacacagcaagtgctcagttaatacaccctcttctttcccagcctctttggaattcaatgaacctggctctcatcctggctcggggaccctggatacatcactttccccagccttagtttacccatctggaatatggggtcactatgggaggtgtgaggctgaagtcaagcccttggcgggtgtacagcacagagaatgcggacaagcttgtggccagcgtcctctgggttcagggcgtcttcaccttggcagggatggcagagccctcttgcgccccggcaggtcggcggggcaggccaccccttggattgtgacacccactcctctcacctatgacctcatccccagagcggccagtgggaaccctgagggatctgtgagatcactcattccattcacagactcttgttgggcagcagccacccgctcacctccatccccaggacttagagggacgcagggcgttgggaacagaggacactccaggcgctgaccctgggaggccaggaccagggccaaagtcccgtgggcaagaggagtcctcagaggtccttcattcagcggttccgggaggtctgggaagcccacggcctggctggggcagggtcaacgccgccaggccgccatggtcctgtgctggctgctgcttctggtgatggctctgcccccaggcacgacgggcgtcaaggactgcgtcttctgtgagctcaccgactccatgcagtgtcctggtacctacatgcactgtggcgatgacgaggactgcttcacaggccacggggtcgccccgggcactggtccggtcatcaacaaaggctgcctgcgagccaccagctgcggccttgaggaacccgtcagctacaggggcgtcacctacagcctcaccaccaactgctgcaccggccgcctgtgtaacagagccccgagcagccagacagtgggggccaccaccagcctggcactggggctgggtatgctgcttcctccacgtttgctgtgaccaacagggaggacagggcctgggactgttctcccagatccgccactccccatgtccccatgtccttcccccactaaatggccagagaggccctggacaacctcttgcggccctggcttcatcccttctaaggctgtccaccaggagcccggtgctaggggaagcatccccaggcctgactgagcggcaggggagcacggcccgtgggtttgattgtattactctgttccactggttctaagacgcagagcttctcacatctcaatcaggatgcttctctccattggtagcactttagagtccatgaaatatggtaaaaaatatatatatatcataataaatgacagctgatgttcatggagcattctttgttttcttttctttttcttttcctttttttttttttctttttgtagagataaggtccagctatgttgcccagggtggtctcggattcttgggctcaagtgatcctcccacctcagcctcccaaagtgctgggattacaggtatgagccacggcacctggccaagcctgtcttacgttacgtgccactgaatcctcacaccaagctgggaaggtaaacactctttcaaacatttcaaacatcctggtctcaactccaatcattctcaaagtgtggtccctggaccagaaacagcagcagcagcaagtgggaacttcctgaaaatgcagattctcaggtcctgttccaggcacgatgaatggcagtggggtccaaaagctgtgtattgttctctctttttctttttgaaacagggttttgctctgctgcccaggctggagtgcagtggtgcaatcttggctcattgcagcctctacctcctgggctcaagcaatcctcccacctcagcctcctgagtagctgggactagaagcatgctccatcatgtctaatttttatttttttaaatttttgtagagatggggtcctgctatgttgcccaggctggtcttgaagtcctgggctcaagcgatcctcctgcctcagcctcccaaagtgctgggactacagacatgaaccaccacgcctggcctttttccgttttctttttcttttccttttttttttttttttttattttttgagacagagtctcgctcggtcacccaggctttagtgcagtggcgcgatcttggctcactgcaacctccacctcccaggttctagcgattctcctgcctcagcctcccgagtagctgggactagagatgcattccaccaggcccggctgattttttgtatttttagtagagacagggtttccccatgttaatcaggctggtctgaaactcctgacctcgggtgatccacctgcctcggcctcccaaagtgctgggattacaggtgtgagccaccacgcccagcccaaaagctgtgttttaacaagcgctcccagggattctggtgcatgcacagggttgaaagccactgttcctgagcagtgttctcagctgggcacctgtgctccccagtgggcatctgcgctgtctggagaggttttcggttctctaattggcagggaaagtcgggggtatggggcgtgtgatgctactgacctctgctgggtggaggctgaagatgccgaggagcctcccacaatgcacccaacagctcctaaaacaaagacttacccagcccgagcgtgggtgccacccctgttgagggacctggttctagaggctctaaccctatcagcccatgacatagagggggaaactgaggcacagagaggtgaagtaagttgcctgaagtcacacaacgaggaactgagagagctagaatttgaatccaggccgtctggtcccagaggccacacccctctcctccctagctgtgctgtgaccctgtgaggtaggtgctgttattatttgcagtttctttctttcttttttttttttttttttttttgcttttttgagatggagtcttgctctgtctcccaggctggagtgcgacagcgcgatctcggctcactgcaacctctctcctgggttcaagcaattctcctgcctcaacctcccaagtagctgggaagacagggtttcaccatgttggccagactggtcttgaactcctgacctcagccaatctgcccgcctcagcctctcaaagtgctgggattacaggcgtgagccaccatgtccgggcattttcttagatgctcagagaggtggagttatttacccgaggcagagcttagatcccaatccaggtgctcctgattttgaacaaaccccacccccaaactgtttgcccagttttccagataagaaaacaccaggtcaaagagaagcagacttacccaagaccactaaacaggccagcaccaggtccggccgcggcaccaacctcctccgcagggaagagtgttttgcccccattacacagatgagaaaagagaggcctgggcaaggggatgccagctgttctctgagcacactgagggaaagtggggtataggacgccgggaggtggggggcggggcgggggctacacctgtaggatcctgagatgaccctctcgccgtccagcagcacaaacttctcccgcacggtgccgctcacctgccgtcgccagcggctctggaagctgcagccccgcacgacacggacatccacgttctgttggtgtggggagtggagggtacacccttgctgaggcccactgcatggattcaggctccctccagactggttctaactgggggacccatgactccatagaagtatctgtccaaggccaggcgtggtggctcacacttgtaatcccagcactttgggaggccgaggcgggtggatcagctgaggtcaggaggtcgagaccagcctggccaacatggcgaaaccccgtctctactaaaaatacaaaagttagccaggcatggtgacacatgcctgtaatcccagctactggggagtctaaggcaggagaatcgtttgaacccgggaggtggaggttgcagtgagccgagatcacgccactgcactccagcctgggcgacaaagcaacactccgtctcaaaaaaaaaaaaaaaaaaaaaaaaaagaagtatctgtctcagcttccttagagccactgatatcaaccctcaggcgtttcttggggatacccaaactcagtgactcaagattccttgggaatgcccacccccacctccccagtgctgtgggcatcagatcccaggggaccatccctgctagcatccatctcaatgacccggagctccatggaagggtctgcccccactgcccccatgccaggggaatggggactcacaggaccccctggcccggcccctacctccgtgttccaggggttcacccccagctgctgggccagttccaggaaggcaggcagctgctggcggtccaggagcaggtagacaggtacccagcggcgcgtggcagcatccaccaagtccaaaagcaggtctgggtcagtgaagacgtccatgaccacggccaccagctgggcatggggagaggggcggtgggcttgtgaacggaagctggctcaggggacactcagagggtgtgggaaacctgacatctggaatctgggagtaaagtgctctgggggctgggagtttaaagttcaggtgggctaaaggggagacccccagacatacactgctgctcaaacagcacctacgtgtgaatgagcaaaacgctgcccctccatgagatccccagcccctcctcgagattcccggcccctaaatgctggaaaactgtaatcataaatcatgtttgcttgtttttttgtgtttttgttgttgttgttgttttttgttgtttttttttttttgagacggagtctcactctgtctcccaggctgcagctcaggggcgcaatctcagctcactgcaaactccacctcccgggttcaagcaattctcctgcctcagcctcccaagtagctgggactacaggcgcccaccaccacgcccagctaattttttgtatttttagtagagatgggctttcaccgtgttagccaggatggtctcgatctcctgacctcgtgatccacctgcctcagcctcccaaagtgctaggagtacaggagtgagccaccacgcccggctttttttttctttttttaaaagacgaagtcttgctctgttgcccaggctggagtgcagtggcgcaatatcagctcactgcaacttcggcctctgggactcaagcagttctcctgcctcagcctccagagtagctgggattacaggcacccaccaccacgcccggctaatttttgtatttttagtagagacgggatttcgccatcttggccagggtggtcttgaacccctgacctcaggtgatcccccagccttggcctcccaaagtgctgggattacaggccgtgagccaccgtggctggcctacaaatcacgtttataacacagaacagcgtcccctgagctgcgacactgcggtacccaaatgtccacggcagtttggctgtaggatcagtggtggatgtcccgtagggcactgtgggcaactgcatttctgggtcctgtggaattttctgggtgctgggtgcaggacggctgacctgctaggccaccgtggcgaacttgggggacacggaggtgctgaaggcctggatcttgcaggcagcataaagcagtggaaaccctgactcagcagccagacagcctgggttcaaatccccactcggccacttacagggaagagatttaaccgcccccgtgcctccgtgggcacaatagtccctctggcggtacagggttccgggacgatgatgcacattagtccctgagaaacccttcacgtgggagctggcggacgctaaggctgtgaagtacacagcaggctttccaagggctgcagtgtggacatctgggccttccttggagggagagtggaaacccctggcttggtgatgaggggatgggggaatgactgagactgggggtgtcataattaggttcaaggggcatcgatacctaagggcatccaggtcttgggggagggtaggggcccccatttctttctttttttttttttattgagatggagtctcgctctgtcgcccaggctgaagtgcagtggcttgatcttggctcactgcaacctccgcctcccgggttcaagcaattctgcttcctcagcctcccgagtagctgggactacaggcgcccacaccatgcccggctaatttttgtatttttagtacagacggggtttcactatgttggccaggctggtctcaaactcctgacctcgtgatccgtccacctcggcctcccaaagtgctggaattacaggcgtgagccaccgcgcccggccgggcccccctttctgagagtaaggatgaggtctggggttgtaggcacctgagtcctggggctggaaggtgtgcactcctgggtcccaggggtataggtcctttagggtaggggtgtgcgcttgcaagtcccaggaggacaagggagagaatgcctgggtccccgtcccagtctggtgaatggacacagggcccccgcgacacccaccttgtgggcagcctggatctccagccgcaccagctccttgaggggcggctgaccctctccaggaggctgggtgtacagctgcgcccgggtgatgcctttccacgcagagtccactggccagcccagccgcaggacgggcgccggctgctccgactgcccaggccagtagctcaggctgcccgcgtccacatcggtggtggtggctccctctgccatcccgctgggctcctgcttggccactgtccagtcttcagctgccgctgccaagccctgaacctcatccgcactgaggaagggccacagctcctcgcgctgcacgcaggtctggaacgcctccgcgcccttgctcaacagagcctccagtgccagccgctggccctcggaatatagaaagccggggctggccccgggcaccctgggaccggagtccactccttccagcgccgccagctgggaggccgccatcggggtcactcgggtgggaggactgactgtgagaggctgggtccccgggggtctggctgtctctggggactgtgatcatctgggggttctcctgataggcagaccctacgtggccatccgaggcctccggcggggccctgcagatgtccaaatggctccctgcagcagcccctgccacactgttctgacaatcacgctgcccaaataagcgaccatccaatgtgtcaggccactcagatccgccacctgcctgcacccagtggcaccatgcctggctggccttccgtgaccttcctgccagccgtctctgctggtcaggttgacctcctgacaccatccccaactgtgtgacccatcagctggccatctctgctcagccacacgacagcctccaacccaccagtcacacagtgcccagtcagacccttcagctgtcctgaatttggtcaggctgaccacttgatcatttccaggcggcaagctgcctgcctgtctctaatcacccaaaggtccttaaaggcacgacaggttgcctgcctgcccccggccaagagcacgacgaactgaccctctccttccactgtctggcaaacgccaatggcttccgactgacagtcacagtatctgcctgttggagcatctgtctctggccaaatctgacagcccccacgagtttctcctgctcatcagctctcacccgcagaccagccaggatgcctctccactgggcctgctcgctcagccttaaaggccgaaggcttggcaaacccttccctaccctgtcaatgggggaccctgctccctggaccctcctcacactccttccagctgctgcagtggagggtgaaatgcgctacaggggtctccattactatgggacaggtctatgatcttcacagcccatctaggtgtgagtgccacctaaccagccaccctcctcaggctggctgcccctgcctggggcctggccctgggacctgttccaggccgtcctctgatctgcggggagccctacccaagctgcccccagcctggtttctgcctaaatgctatctcctgccagctacccggacgcttcttcccggacaggggccagtctctatctcgccctgtctccctcccaagcctcagttatccccttgaggctcctgacccaacctcggggaccctggacccttgatccctgcaaaccagaagcccttcattccaatcccaccaacccaggccgctgcttcctccagaccacagcagggagctgcaaagagaagaaaggagtcaaggcaggccagcctccccgccccaccctcacccatcccccccatcgccggggctcacccacaccggctagtgccgggctcaatggcctcccttccagtgcctgctttttccgagaacgtaggctgtggctccccggcttctacttctgcggtgcttcccggcttctggcctcactcatcaggcctcgacctggaatccagggagcccggccccttgtgtaaacacaggagggcccccacaggcccctggaggaggtccgggggtgcggctcacacgctttctttacc

SEQ ID NO: 197 - DNA, 97616 bp, Homo sapiens
  source 1..97616: mol_type = genomic DNA
tgatattctatttggccctgtgttcagggtctctctcccacttctaagagggtagtctatctcagccgctgcggggtcaccaacagagcctggacacaggaggcatctggcaaatacgcgctgcatgaatcaatgactccagtgcccacgcgcaaggggcccctgggctcagaaaaccccaccaggcgggcccctccgagctcggcctgtcctgggggtggaggaggaagttcgccccgcgcctgcctcgcaaccgcagccgcctccgtgcgcttcctgcccgcgccgccctccacactgcgctccgtgtctggcagcagcccccgcctcgctgggcgcgttcccgggggtctcggtggcgggagccgccttcttgtgggacttgggggcacgtggcgcggggcggggacgcggacagacccctcccgcatcctaggaggcctgggagggtccgcggggacgcggggagggggcaccgcctggccgaggaccctcccccggtcctccccgccccttccccgtcccttccacgctcgccgagggcaggacttcggttccgcgagaccggaggcccctcgtcctcctcggaagccgcccgcggccggggaccccagtcccgcagaggagggcggcgctgcccccgcctcccgcttggagagcgccgcccgcaggtgcccacggaggggccgcggcatcccagcgccctcccaggaaggagccgagcggatcaccgccggctgcagcggaggtcggggcgccggggaggggcgcggctagggggcgaggtcgaagggcgggcacctgcgggtggggcggggcctgaattagcgggagcgcccgggaggggcggggccggggcctgcgtgagcgggtcggggagggggcggagcctgcggggggcggggcctgcgtgaatggggcggggaggggccggagccttgtgagcggggcgggccgcgtgtgcggggtgggggcggagccttatgagcggggcggggcaggggcgtggtcggggcggggcgcgcgggcgcccgcggcggccctcacttcctctggcgagcgcagccgggcggaagtgcgtcagttgttatctgttcggggcgccgccgccgcctcacgagcccggtgcccaggagcccggccgcctcccgcctgccgcctgccgcgcccgcccggccccgcccgctcggcccgatcgccgcgccgcgcgcatggggcgcgcccccgggggggcggccgagggccgctgagcgccgggcccgcccccgccgatgcgcccagccgcccgcgccgggggtcccaggccgcgccgggcccggggctgagccgccccccgcgcccggcatgcccggcccggcccgccgcccgccgccgcccagggcccgagcccgcgcggcgcacactcagcccggcggcgccgcgtagccgagggagcccgcctgctgcgagccaggcgcggggcgtcaaggtcaccggcccgacggggcgcacgcgcggccatggaggccaaggtccgcccgagccggcgctcgcgcgcgcagcgggaccgtggccggcgccgggaggccgcccgcgacgcccgcgcccagagtccgtcgtcgggcgacgagcccgagcccagccccggcaaggagaacgcgggcctccgcggcgcgcccccccgaggcgccgcccccgcgccccgcaccgcgcgtcccccgcgccgccgccgccgcgagtccagctcgcaggaggaggaggtcatcgacggcttcgccatcgccagcttcagcaccctggaggccctggaggtaggtggacgggtgcggcttcgcaggcgttgaggcgagaacggggcccggagttgacgcgtcgggcgatcccgggacccctgggcttgcgaccgcccgcgccgtgggcagccctgagggaagccccggccacttggtacccgttccagggaccctgggtgcccaccgctcgcccagaccgtcgcatctggaagacccagcagcgtcgggtgggtttggggacgttttaagttgcagaggcaaaaaaatctacgcttcgaaattgggggctgtctgacagcaccgtcggccttttatcagttgtgtttctgtggccagcatatcgctctgcctggttcaggacgtgctagggagcagtgctggatcttagggaggtggtgataaaatggatactccgcgggccatcccgttccctcctcccttcgagggctctgctgagaaggggagaaggagggttaatctcaagacccctcttggtgactgctgcctgctgcatggttaatagattggccaaaaatattgcttgtctggctgacggacagtatttgctgagcaaatactgctcctcttacatgaactcagctgagcagagaaggaaattaaatgctgtctgagagttggggcaggcgctgtctccccaggactggcatgggcaggaatgctagcaagttgccctgcaccagggccgagacccgcccagcgaggtgtgccccgtgcagcacttactttgggggaccctcatctgctggactttgactcccagaatcaccccatttccaacccctctcacttttccaggggcttgggagcccatggcctgggatcccccagtctcagaagctgagctttgggaaaaggggagatgcctactgcaggcccctgaagcagcaagtcctcttcaagttctcatccaaactctggggactgtagagagccttgggtcagggccggtggccagggaagtggccccagaacaggtgccgcatcgtgtcccgagtgcacagtcagagctggggcttcgtgtcccaagtgcacggacagagctggggctcctgtgggcccaggacggggtgggtggtggccaggctcatcacacaggctggccatcctctgtcctgcacattattagatggctccagggctggcacacgccattgctctgtgctgggacgggatggccctggggctgtcttctgccctctcagtggtgataatgacacagactgtacgtgtactgagcaatactgcaagccaggccctgcgctcggctcctgcactgcagctgagaccacgaggatgcccactttccagagctgtcgccacccacctgcacctcctgggtccctaaccgcggcttcctcactgctccgagcgggtcagcccttgtaccctgccgttctctgtctgctttatgtttggtgccattgtgtctttgcaaaaacgtcacctcagactcctctgaagtggtgccccccacccccgtcgacgttgcccaccttctttttgtcatccccactctgcaaagctgttttagaatgtctttgctctccattttcgtctcccacaagaacttgtaagctgaaagagagcagacactgtgctgtcctgtgtgtctcctatggggtctggtgccgggaagagctcgatgtgtagaaagtgccccagatgcgtgtgtcaggaatctgagtgaggagatgaactgtactcaggagatccagggccaatcccaggcccacgtgttttgcccgcagcggctctgactggctgtccacctgctctggcagggtcacgtgcccccagcctgcaggcagtgggttcagtgggttttggtgacttcggcttagaccagctggcccctcaggtcatagtgagacaagtctgctgctgcgtggcgttaacacagccacagcaccccagggtggtttcatgtcccttcctctgcccttcggagcctgcctgggaaagtacggggcttctgcacaagtcataacctcgtgatcatcccatacgtgtctcttggttgtctacattttttgccaaagtatggtggtttttccccaaagttcagataattcataattatatcaatagtagtgactggttcagtaagcattctctccatcaggcagtgttctgagctgcctttcacagacatcaactcatttactcctcaaatgacccacgaggagggctggatgcccccattccacagatggggaccttgaggctccccattgaggcagagcaagagcaaggagcactgggtgccacgcctgtccggccttagagtgagcgggcgctgccctgcgaggccacccacacgggacaccgagggagatgtggccaccaggacccagcccagaggcacagcctgcccttggctctgccgcctttgctcacagtccctctgcccccacccgcgtcttgagggctcttcctactctgggatgctggaggatgggacgctcaggagttggaggaagcccttgtaaccccagaggctggcttgtgcccgcgggacactgcagtggtataaacaaccaaacacaggtgtagacttgccggggaggtgcagcctgcctgcaggagtcctgttacctcaccccagaccccacacacactgggaccaactctcggccccagccctggcccctggggcagacccccactcgcagccccttctgaccccaggcagaccaccctctccgcctgtctgaacaggcaccccttgccctgtgcccggggcaggtctctgtacctgttttgtgcccccggcaggtccctgccccttttctgtgccctggatgggacacacaggctgttctgtgcccggggcaggcccccgccccctttgtgtaccctgggtgggacacataggccgttctgtgcccggggcaggcccccagcatctgcacatttatatgtgctcctgtaggggaggaggagtccccgcttgtcctgggcctgtgtgtgctgtgaacacagcaggcactccctaaatggtggtggtggtggttgtgggctgaggagggccagggtctggcctggctcagggtgtgcctgcagccctggagacagcattaatgattaactgcccatagagatgggagccctgtggcagggctgaggacctgcagaggggcgtgctgggctgggtgtgctggggtgggtggggcggcgcggcagacctgagccagcccccgcttgactttctactctgtaaccaggggccgtggtatgtggggacaggaggcctgaggaagccccgctggcctctcccctgctcttgttctgaccgggaactctgggtgcttgggaacgtggctcttgctgtcccttttgtttcctgtgacaactctgtcccctggttgtactgaccagaggacactggaagccccctacccctggagcagtgctgtggccatacgtgcctggtcagtgctgctgttctctgcctggggtcctcccaagaagactggggtctgagaggtgtatccagggctgtgtcagaccccatcttcccacatagcaaaggccatccttatctggcctcaggccacagaacaggttgtgccggtccctgtgtctcctgggagataggccaggcctgcttagcccagtgggctgcaccgcccactcccacatgctggccgctcggccccagtgacgctggccatggtgctctgggctgcgcctgggccacagggaggtggcagggtgcccaggagcacattggccactagctccaggcggacaccaccattctggtttggtgtctgtgatttttggttaatttgcatttttcaaacagcaaatcactttcacctggtgactttcacttggtccacacgtcaagctccataagaaggtgcgtgctgaagcttgagctgttccctgactggcacacgggccacgcagaaggtccacgtgtgtcccaggaataaaggcggaaggaaagcacccagcctcctggctcggtggccagcggtctcctctaacgcctgtgcttccacattctctgctcagcataaaccacaggacatgcacccaaaatgctgctgaacctgcacagacggttgtgcttaagaaaccccaggctactgatcgtgtgcggcccccggcctcccagggctgtctgtgggcgagctgtgacccctgctgaaaatggcccagaaccctggtgggcatagggtgtgagcctggagccggtgggccttggccaaggggagggtacaggttttgagacacggcccgtcgtggggaatgtgagggtgtgagggactggcccagacactgccctgccctgcatcctggaggctgagccaggtggtctctctgtgagcccctagtgggcctggtgggcttcacagaggggccagggttccaggagcaagagcccaggcataggatctgggctggaagtgtgacctggccatgtgggggcggggctgggcccggcctgccgagcaccgcgtgtggggcctgacagtgtcacttggacctccggggaccgctgaggccacactgttggtggtgccagtgggggctgagtttgccaggggcactgtgagtccatgcctggcccatctctcagatggtggtgggggctgagaccgcagacatttgggttcagtgaggagagccagggagagggcaggcttcggcccaggaactccttgtggctgcttcctggtctccaggtggggaaactgaggcacagagaggggaagtgctttacccacagccatggggcaggggtgcggagctgagccggggcctgccctgtgacaatgaggggctgcctggaagctgcatggattcctgttcctcccacagagtcccacagctgtgggcaagggctgctccctccggggaggtggactcagaggccctgaaagcagcgtcgctggcccctcggtccacgtgggtgcccgccacctgtccaggccctgtctgggggccagcagctcctcaggccctgccatggctggagcagggcttgcacctggcctgctttggctctgggaagggttccacgtcctctgcctgtgcttctgcccctcacgggcccctgcccagtggcttgctggcctcggggtcggggctgttacagcaggagtcaccggccctcttccccatcccctccctcccggctgcttgggcctgtcagttcttggctcaggtttccaaggccttcctgtccttgccgtggctacgccgcgtgcctgcacctccgcacgtgctgcgcaccttcgcgtttggggcctggtgccggctgccctttgcctggaggggtctcccggggtccctgtgagtcaccgcacagtcctgcagcagggagtcagacccacactagaccctccttccccactaggctctcgtgccccagctgtccttacggggaggtctgtcgccagacgtccgccatatcccgcctttgtgtgattgcttctctggagaaagagaagtgcccagaactggccctgctgtctgtggctggcagttttaaggctcctgatggttgtgagggtctgttccctgccgaggggcccgtgttgcgtatttacccgggcttgtgtttttgtcactctggaagcctcgtttcactgtgttttctggctggttgttgctgtttgtcttcccacctgacatctctacctgggtactttgttggattccctcctcagcacaggcagtttctaggggactcttagggggttgtcattggccctgctggcgtctgcacatggctgtgacgttgctgcttccctgcggctgcgctggatttgtgagtgtgtccagagcgtgaggattggtgttgctgtttgtgggtatctgtgtccctccctccttccctgtttccccacattctgatgggcgctctgtcttgcacgggacgcatctctggtccagcatcaggtaggggtgaccctgctcacccagcttgtgccgccgccccgcgcttccttcccaggccctgcggtgtcctgtgttgcgcggggcgcgtctctggtccagcatcgggtaggggtggccctgctcacccagcttgtgccgctgccccgcgcttccttcccaggccctgcggtgtcctgtgttgctgtcaggctgtccgtgaactccggacgtggccctggcgggccgtgttggtggagtctcatttcgggttgtttgccgacggttcggatttttgccaccctgtttctagtaaagttagtctggtagtcttgcttccgctggttttgctgcattttggttgggaacttttcatttttttctgtaacgtcaaaatggcataagaatttatcactttctcagcacctggacagaatactcgggtcccagcactccagcccatttactggtgaccagttagagaccccaagtcagcatggtttggggtggggacacgggtaatgagggagaggtcatgggaccacctcgctaggagtggaggctgggggagaggagcccggggtggcctggctggctcaggagggccctctaagtaggaggaccacagagctggcccaaggtcccagggcagacccagtctggctgccctgagtcagaggcagccacgggaggagcccagcccacctgagtctccaggagtccctgagtgacccctgtgtcccaggctgccccctccctccggactccccctccatactcccctacccagatggcaccaggaccccctctggcctcagctcctgctttcaggagcccacgggcctgaccacccttcagtgcccccaggcctcctgcccctgtccagatgagctgagtgagtggccccaggctagaatccaggctctgggcctcgggacccctagggcgccgcctcacacctgctgaggcaaccccgggctggggatctaacccttcttagtggcccggggtcaggccctgactcccgccatgtggcccatgacaaagccatttgtccctaaagaagggtgagcatgtaagcagcccccaggtccctgagggagggccagggcttgtggcgtgcgatgtgtgtgtttgtgccacgcatgtgcctcccctagagacccctcgggcctggtgtcctccccggccccaccccaggagtgtatggcatctgaagtggtcgtgtggcagcagctgggaggcccattgctgagcctggcctgcacccctgggagagctggggggcccgtcacagcctggctggctgcaccccgggagagctggcccacagggcctctggggagggtgcctgctgtttctttgggagcctggggaggtggctggcagggaaagccggccgtccagatctgtcaagccccacagctacgtgccccctgtgtgggtgtgggtctctctccgggcccctcgctcacagtgaggcctgtgtcgggggcatggggccgggggctgtgttgggatgtgacagcagtcggaatgttccagtggggaggcctgcgggacccacaggcccccagccacccttgcagaggcgccgcagcagctacctgcctgtcagacaccttctggccaatcccggctggaggctgagctacaggctgtcgaggaccgcagcagagtggatctgtggctgccgacccctcccggcccctagccctccactctcatcctacagaccctccagggaaatgaggaggatgggccatccccacacacctgtcctgggctgcccccaccacccccatgtggggatgtgggtcatggaagtctgggttctcctgctctacagcctggaatgtccagatcccctgggagctttgggaggtgccggggccccttgaggtgctactgcacagggccccccatcctggtcagcaggcggccctgcgtgggccttgcagagctgggtggggctgtgcttgggtggccaccaacctattctaggggagggaggtcagaggctgaagagccatcaggtgctggtgtccccgtgggccaggacagctggaggcgcagctgcagctaccctgtgtgatgcgtggaaactgaggcttggccatggtactcaccccactgggggctgggcagagaggccgacaaccccagccaggtcccgtggccacctgcccatgctcccgtctgctcagcgggcttcctctgctctcaccacggcaggctgggccccttctgcctgtgtatgtgaccaagggtacctgccacctctgctgtcccctgggacagtgctctgcaaggcctccaggagcttgggtggccagactggtccctgggactggtgggcctcatccggcctcggcagccgccccgcccattccagatctctgctctgcccaggtcttgatgctgcacagtggagcctccagggccggccaggcagggatggtgccgggcaggggtggtgccgggcaggggtggtgctggacctctgggagaggccaggtgagccgctggccagcagggaagggccagccaggcaggggtggtgctgggcagcagtggtgctggacctctgggagaggccaggtgagccgctggccagcagggaagggttctgagctgttctgctttccctgacagactttataagcatttattgagcaccggctgtgtgccaggccctgggccggcccccaagatacacccacaggccccattgccagtgagtattgggatggcagtaaagagtctgtcgtcgaaggctaggagtcacagaggaggccacgagggcttctggggaagagtgcaggctgtgaggggcagcaccgtggcgtggcggttcccgagagcccgtcaggaagggcacatgtagcaggtggtacaggtttggggtgccggtggcaggcaggctggagacagctgggggctgtggctggggggctgcagggctggggggtggggcgctgcgcagcacctaaactccgtgagatcaggtgctctggggactcagggcaaatggggtacttggttccacgtacctgtggaggacggcaggcgtcctcaggagtgtgagggacagaacggcctctgagccccagctccgttggcgcagcagagctgtgctgatctggtttgtgagctggcctgtggggtggatggggttccccagagctgtgctggcgtcagggaggaggctgggtgggctactgggctctccgcagcccagacaggtgtgaaggtctccacgcccgtcttcccggcccacgtgtgtaccatgtacgtgcacccgggaccctctggccggaatccgtggtgtctggctcaggaggcgccggcactgccctctagactctgcgggagccatcaagcgtctggggctgggagccgcacgccgtgaccctgccccactgaggccagagggacacctgcccagtctgtggccgccaccttccctctgttgagaacttggtcctggctggcggctttagggagcagagcagccgagtgtgtcccaggcttacacccccactgtgggtgctgtgctgtccccatgctgcacatgaggaacctgacgcacagagccgtgcagtcacttcccgtgtctacactgctggcgagtggctgagcaggatcagaactcaggcaagggctggaggctggggctgcccctctctggcctgggctcatggggccggcctctctgctccctgtcctctgtcccccatagggccagccggtcctgctgtgtgtccagaccagcctccggggagtcctggccctgttgccatcccctgtcctggcccctccacccacccagtccatagtttcctgaatccgacctcatccagctgctgtcctgcctgggagcccagggccctgcagactccatccagcccgggacagcccattcacacccttacagggatcccaggccctgcagactccgtccagcccgggacagcccattcacacccttacagggagcccaggccctgcagactccgtccagcctggaacagtctgtgtcctcacagggagctcaggccctgccacagccccaccctctctaacctctcctgccgcagtgtcccccacagcccttggcccctgccccagttgctgctgctcataccccagcaggcctctggctgtcctcggccagaccctcatcccatgcctcactcgcctgcccctcacaccctgtcctgtggccggcgtggctgcgtgcctctccccagggaccatgtggccaggagctgggcggggaaggagcccaaggggcctgcagccactgccagggaggggaccctgatgtggaccgggcccctgacgtggactggactgggtgggggctacattggtccccctgcaactctgctccctggggccctgaggtcagaagtgggtcggcctcgtggtcctgttcactctgggagcccagcccctaccagcccctagccccaggggtcgtcagttctgtgggcacagctggactagaattccgggataaagctggggccgagcggcggctgcccctgtggtcctcgcgccccaggcctgtggctttagcgacacctggctagcgtgggcccgggccgccctccccatggctgaggaagaggctctgtgtgtcccaggctgctgcgtgggatcgccagtggcagctgtcagcaggggtgatggccgggggaggggctcccagggccaggagcctcagagaccagtgtgggctgacaaagcccagccccagtggttggtgcgctgggtgccctcactgctgtcatgagttcacaggggccagtgtgggccatggaaatgaagcctgagcctgccttccgctcggggcccaaggccttggacaggagtgagaggggctgccgtgagcaaatgcacggcccattcctgtgcaggggccagtgaggggaggggccaggacaggggcctctggagagggtgggaccccagtggtggattcctcgtcccagcagcgctggccacacagcagggcccagcatgcagggcggctgagcaggagctggcggggagcaggacacccaggcccgtggctcctctccttccttcgactgcccagatctctgctcacagggtcctgccctgcgtcccccctttggggacagcctcacctgcccggtgtctccagcacctggcttctttctgttgtcttcctctaaatctaaatccaaatgacttgcctttccttttattcttttcgttattgtgaggaagtctgtttgtacagagagtgcatggacgggacatatgttggttttgaagaggtgacctcccgggtctgagtgatgcgtcccactcagtgtgttgaccaccatcctgatgcgtcctcatgccccaacctgcggcagccccgcatttccttagggacagagggggcagctgcctgctttcccccacctgccagcaatggtgtggtccgtccttctgggggcccttctagaatccttggcagaccccactggtggccggggcaggctccagccctttgtcacctccctcctggcaaactgccgccctgggccatcttccctggtgccacctcagccctccacccccggcccttatggccacccagaggaatcctgcggaaggcctttggtttgaagggtgagactgcgggccacagccaggtgtgatccgtggtcttccagtaaatcggagctggagggaggaacgtccgagtgcacagcaggactgacctccaggcctggcacgtgacagtggcctcccagtcgggctggtcagagggtgactgggcagcctctttcaccctccaggctcagcccctatcagacggttctccaggcgtggctggactggaaccctgggataaaaccagggccaagcagtagctccactgcagtcctcacaccagcctgccccttacaccatcccccacctccctgcttcaggcctcgagcccgctatccccatgcctgcctgtccccgccccctcctgtccccgccccctaccgtccctgccctctcctgtccccgccccctcctgtccccgccccctcctgtcctcaccctctcctgtccccgccccctcctgttctcaccctctcctgtccccgccctctcctgtccacctgccgtgccccctgcattcacacccgtcctggcaccactccatcccaggcagcactgctgttctccatgacaccgtcaccaatggtctgggtctccgacttgtctgcaggtagctcttcccggcccgcacagggccaggccacagcctccatagctcccaaggggtggagtgcagcagtaacggccaagctgggcctcacagtgccccgcctcccaccccaccccccaggagccctgaccctacctccttgcccctagagtgcagccacatgccctcactgggtgcttgggaatgtcagccagccccgagaggcagcagccaccatgcttttggtggtcctgcaggggcagcccagctcccagctgctggtccgttgctaggcgagagccgcaagcccgcaggaccacatcctggaggccataggagcagctgggcacgacctggaggcctctggaacaagtgaggtgtcagtgaggcttgccggggcagtttctgtgggtgcgtgatgtggggtccccatcagaaaaaaccggccaaggcgacattggacatgggacgccctgggcggggggagatgtgggggctgtcgcccaccaggtgagtgtgagccatgggggagatgggtcatggtgggaaagggtcccgttcccaccttcgcagctggaggggtaattagacccagtccccacacggggccatgggtgggcctccctgtagggtctcctgtgccagtttctgttcagcttttgacccaaggcagagaggatgtcggggcacaggccaccacaggtcccgggtatgggaggcagccatgccagctgggtgctgagcagattttcaggtgctctgcagggagagctgtggggtttgcacacagactgaacacagttgagagtcagaggctctgggctttgggcctgagctcttggaatgacagagacaagcctgacgaaggtgtgagccaacaaggttctgggagccaagcagctgcagcctccctcagcctcctgcccccactggagagcagcttccaacccatccgagaagacccctgggggctccctcagccccctgcccccatggagagcagcttctgacccatctgagaagatccctgggggttccaggcctgactttgcccaggggaacatggtcatcactctaggtgggaagcagaggggcctgccagggaggtgaggtcttgggtaggtggttctccagagcctcctgcctggtgccaaggaggggagaggcccttgctgtggtttcaggagcagggcgtggccacctggctgcagggggtgggccaggccttggtgcaaacaggcagccccgtcccaaagaggggcagcagggctctgtgtgtgctgaggtagaattattttatctctccgtgtctggttcactgtagcgtgattaggaatgttattggtgctgtatggtaatgacattaagagagccaaaagcagtcgcatagaattgctacaggaaaatctgtctagcaatgtcacggcagcctgcgcccagccctggtggtcctcctgggagaggagcagggaggtctggggccctagccactactgggggtgctggcgccactgcagggcagtggcgttgcgcagggagggcctccaccgcgccttcttggagggcccctgtgtgcgcaggtgtggtgccacgggtgctgacccaggtgtgcactgcacacctgtggggggttcaaggcctccgctgcctcagcctagcaggggttcctgcagctgggacagtggcctgaggcggccctggctggcaccccagggctgggctgggtggtgggtggtgctggggacagctcctggagcctttccaggcctctctgtgtctcttgtgtcttcattcgacactggggtggtcactgcgaccaactcatggggtcctgtttgtgtggattagataagcggggcccaggccaggcacggtggctcacgcctgtaatcccagcactctggggggctgaggtgggcggatcacctgaggtcaggagtttgagaccagcctggccaacatggtgaaattctgtctctagtaaaaacacaaaaaaattagctgggcgtggtgacctgtaatcccagctgctcaggaggctgaggcaggagaattgcttaaacccgggatgcagaagttgcagtgagccaagattgtgccactgcactccagcctgggcagcacagtgagactccatctcaaaaacaaaaagataagcggggcctgacccaccacttagcagagcacctggcacagacctcactgcggtgaacacgatgaagtgggtgagcgcggccgctgctggtctccttggcttggtgcagggcccccacccggagctcatgtcacttccccatgcgaaccttctgggcccttccttccacggagcccaggcatccttggggtgtggtggttggcaccgcccatggggtggggctgttgcctagcttacaaatgaggacactggggctgcccagggcacgcactgtccctcagtccctggggactgccccccgtctggcctggactcctgtcccggccccacccccacccgtggtctgccccaaggggaactctggtcctcacaggagcgggggtgaccacgctgctgcctgtcatggtggccttggacgggacgctgtatggtctctgagctgcaccaccaacccctcaggtgtacgtggagtgactgagcgactgggcagagtggggtgttgggtgcagcggtggggctggcaagggcccctgcctgggcctccttggtcgtgcctctctcagcagctgggcagggcagtgctgtggcgttgctgtggggcctctgaaacctgccaggcgaagcccacagggccagccttaccctggaaagccccggagtgaccagcagaggggccagccgcacggctctcccaggcctgggtacctttcccaccgtcttaaggtagcaggcgaagcgctggctggcatctcaagagcagagtgctgggacagccctcccagagcttcctgggaatggcctctgttctctgcagtgagcgtggctgcagtgctggctgggggtgtgtgggcacaggggctgcgcctggagccggagatgtcggaggcctctcctcctcggtgtgggcacccaccccatgctgtctgttctctagaatgttcactcagcagcacttgtgagccctgtctggggctgagcagggggcaggacagatggacattctggtgggggtcagacgggacaggaaactgccttgtgcttggtgtgactgtggccggggtggggagggagctggagggtgggtctgtggatgggaggaggggccggcagaaatctttatatttttttgaaagcagagtaacactagagcaggtttacagaaaatgtggtaaatttaaacaatttgcccttgacacatgcgtccttctggccagctgtgagcactgtggcaatggggagaggtgtggagcgggcctgggggagcgtctgtgccccgagggtaccacccggtcccgcctcctcagatctgccctctgcctgtcccctctgactctttgcccagtagaaagacaaatcccagcacagtggtgccctgcgtggcaggctgcccttgcaggtttcctagttactgtgaaaggtaacaccttgatttgttcctgcttttgatccagcgctgcaaacagccgttctctgggctgcagcctttgattcatccaggctgagaccctcagagctcactgggaaccgtttctgcagtgttagcagattgcgtccacagctgcctgggatgggcagccctgacagatcctgggtgggcgagcaggaactctggaggccatgggctctcgggcttgtgcaggagcaggccgctcacagcagggctctgggccttgagtggtggctctgcagagagcatatggcgggagctgggcctcggggaggcaaggagtcttcctggagccggaaacagcaaagagttggagtgacaggatcagccctcgtgggcagggggcccggaaacgctgctgggcctctcagggcctccagctcagactggtgggggtggcgcttgtgtcatggggcgggcgcccagccggagagggcgtggccggcaccaccatggctcttgtctctgtcgtctgcccttaccggagggacagccaaggtccttctccccagggacaccatggctctatgcgggggcgggtcctcctcggggacactgtggccctccgtgggggcggatcctccccagtggcttcccagggttcttggcagcagctctgacatgggttctgtcctgggcttcactgctgctgttttcctcacagctgtgccctccccgagaggattctgtcctttcgtggacgcttctccctggccggctggctcctctggaccctaaacttgacgcgccgtatctgtctgcaccagccctggtgccaggagctgagccagcatacagaaggtgcttactagtggtttatcgagtgtggaggtggggaccccagaacctggggctgcccgatgtccaccggcagggcggaggctggagtgtcctggggctgtccgcaggctagaaggtgctctgaaggagtcgagatgggacgagaggggaccaggggaggccagcaggtttacagggggcctgggggtgtccccagggtctggtagcccaaaggtgaacacggggaagcatctctgtcccaaatccacagacccgtctgggagcactggccagaacccctcaggccctctggaatatggtgtcacctgggggagcacttcctgtgggctgtcacctgggggagcacttcttgtggggcctgggtgtcccctggagaggctcctgtggtccctggcccccactgcagggcactcgctcttgaaaggtagccctggtctcagcagggaggggcagtcctgggcagccctgggctggcctcctgtgaagcttactggagactccctgctggactaagctttttctcgtctggccccttcgatggctgagccctgggaaactcccatcccccatcccgcagcagcatctcacctgccatcgtccttcccctcccatcccccgtcccacagcagccatcttcctttccctctgaggtgcccctcccaagtggggaggctccttcccaagagctgctcaggtgggtgctgtcctgggcccaaggccctggggtcccgccaattaactggcgtttccctgtctccctgcagaaggatatggccctgaagccacatgagcggaaggagaagtgggagcgtcgtctcatcaagaagccccgggagtcggaaacctgcccccctgcggagcccagtgagaacaggcggcccctggaggcaggcagccccgggcaggacctcgaacccgcctgcgatggggcgagaaaggtcccactgcagccctccaagcaggtgagcaggtccctccccgaccggaagctctgcggcgggtcagtgctcaccgccccagggccatgccagcacctggacaccacgccacgtggcccccgggcctgcctggcagcgcgcccatcgttgtcaggcttggggtgcaggacacgtggacagggctggggcctagcagaggcaggagccggctgggtcacggaggggccgtgacgtgcccagggccacagcaggagaggtgcctgtctggggcagcaaggcgcgcgttccgggctggggcgccaagctgataggccggccccgtttccctgccgtgtccatcaggctccgccgactacaggtgtccagagtgtctataaggagggggtccaggctcattgccgagggctgtcctgtccacacgcagcgccatccgctcacgtgtgcggcgtggggaagggaatacttggtcccggcagtggctgcaggcacgtgactgtggtcagtggtcaggtgcgtggcccagctgggaacagggctctgcctgccctgcccaggggcctcctgcccaggaggggctgtcagagcaggtgggggcttccccagcgcgtggggctctgtcctgggtgcagctcagcctgcagctgcttcctccgcgggggtccgctggtgtgcgccttccttccagggtggggctctgcgcggtgtcctcggctctcctcggcccccttgggaattgggctgctggagaagggcagcatgcctcctgggcccgggctggacgggggttccgcgggcggtgacacctgcccaggtggacacgtgctctttcttccatgcaggtgtgctccccagaaggggggccgctcccagccagccactgggaccagaacggcccggcccagcgccagcaacagctccagcccagccagtccagccagccccaggggtccctcccagccccgtcggcactcccggaccctgggcagccctgccagccctcccagcggccactcctgggtcagcgcagctggccccagcggtcacttctgggcctgaaacagccctgccagccccggcggtcacttctgggccccggtcagccctgccggccccagcggctccttccatccccagatcagctctgccagccccagcggtcacgcccggcccagccctgccggccgcattgggcactcccaggccccaggcagtgctgcaggcgcctgcggtccctgctgaccccgtgtcaccactgccggcgcctgcggtccctcctggccccacggtccctcctggtcccctgcctctactgccggcgcctgcggttcctcctggccccaaggcaccgctgcaggcgcctgcggtccctgctgaccctgtggcaccgctgccgacccctgcggccgtgggccagcccgtgtcactgtggccagcccggtagggcatcctcaggacagcgcagccggcccctgtggtcgctgctagcccagtgccagcggtaccagcccccgcggccactcctcaccctccgaccacgccgacggcccgccagcttcctcccaggacagtgctgctgcccccggcgggccttcctagccccgtgtcagtacggccagccccgaaggtccctgctgggccagcccagccgcccccggcggtcgctgctgcgccccaggcagccccagcggttagtggaagccccagagcagcccggcccactcacgccttcactcctgggcccgggacggccgaggcagcagaagcagccgctcatgggcccggagcagccctgcccacccaagcggccgctcatgggcccagagcagccctgccagcccctgcggccgctcatgggccccaacaagccctgcaaaccccagccgttgctccccattcccgatcgcccttcactcctggggcagccgggcccaccctgccggcctctcctggggctcctgtgccagccgcggcggtccctattggatctggtgccggcccgtcagccccggctctcgctcctggccctgggccatccctgccggcccctgcggtcccggtggacccgatcctgtgcccccgggatggcccgtcaggccccatctgtgagccctggagcctgatgcctgcaggcacctccccatatgggttttccagcccactccagtgtgatctgcaccctggcagggccccaagggccaaggccgcattgcccttcgggctggagatgctttgccggactagcctgaggccttgtctagacagggctgagctgtttgtcgttggaaattgaggctcggccagaggcgggagcccctacagtgccacgatcaggctgaggctcaccacaccaggaagagagatgaacccgcgtctgcctgccgccccgccatgctccctctccccccactggcgtcacagtgcccccacccgcgttgctgcctgtggtgtgcgtgccctgggaggggaacacagcccctgagggcggggaccttgctgggggcccctcagcgtctttctgtgcctctgaattgccaatactgtccttgcatctctgagtctacgtgcacgcttgcccctggcgtgccacctgtgcggagcgcgtgagcctggtgtgtgcgtgctgtgtgtgcatgtgtgcgagagggtgtgagagtgagtggcgtgctgggcatgaaggatctgtggggtgctgcagttcctgcagagtggcccagtggcgaatggtgaaggtgtgggtttcagtccaggccctccccctggtagtcaggaggtgctggtgtccacctccagggcccccaagctacagggggcacatgggcccatctggtgggtcaggacctgcaggggacccggaggctcccacccccacctctcaggactctgcctccaccacccccgtgggcatgcactgaagggttgcctgcagggtctccaggcgagggggaccccacagggtgggcagcgccttctcccggcttccccacagtcccctgcagcgtcccgtctggctgttgacctacatgtggtcgggcacacctcacactacaaggctacccctgggcccatccctgccccttccacggcccccacctgtggtcaggtgttgccaccccctcaggacctggtctcaaggcagccccactcgagtcttctggagtccaaggcacgccactcgcccaaaagggagggggtgtttgggggggctttgactgtctccagacctcaggggagctgggcaggctctaaccagtggtcctccagagagcagcgttgaccacctggacccctgcgccacgtgacaggaggctctggtcctgcaggcctggtcttgcccagctgggctgcctcaggtgtcaggaaggggatgggtgtccctggctcccaggccaggcagctgctgacctccagcaccccgcacttgctcatgaggaccccacccccgcaggccctcccgggtcctgaccagcctctggtgcagcatctgctttggcctccgggccccctcgctccccacccacccgggccccttcctccggtgctcacctggggcctccatcccagaagcgcagggcttatttttctgattaaagaaaataaaaagtgccgtgccactattttttataacagcatcagcgtttgtaatttaaacagacgagcatgtgtcttacgtgatttattcccacaaagggcttttgtgctgggcttggctcgggattcattgcactctgaccgaacagaggggagacctggagcatctgttcctgaccttcctgcccacccatctgaggcctggaatgggggtttgtactgtgctcagcatgggggcaccggcctccagatccccccaccgcaaggctactgtgtgggccagtgtgacaggggtcgagacccccctctcggctcatgcctggggggcacccatccccgggatcagtgtcctggggactggtgagggagggtggttcagctcagagtcctctgcatggcctgggcacgcgtgagggagcatggttcagcccagcatcctctgcacagcctgtcaggtgcttgtgttctgctcacggaaggccggggcatggaggggccgagtcctggctgcagcgccctggctgagctccaggctggacctggcacacttggggtgcgggcttggagggcggtgccatctcagagtcacccacacaagccattgccccgcagaggggctgaagttgccttcagacgtccctgttgtcaggcgtggggaacagtgatgatttaaacagtctcctgccctctttccactttcaggcccctgcccctacccccgggctcctgtgagtacagagggggccgagtgagtagagccatgtctggggcaggcctgaacgggctgagggagtggggaggggccatccatgctggagctgagcagtggcacttggctgccccttaatggggaaggccaggctgccagggagggctgaggagagctggaaactgcagcctgggtccctgtggccaacagctgggggtgcagaggacacccgtggaggaaacattcaggacccagaggggctctcgaggcctggccatgaccctgcagcctccagctcgaacccactgtctgcactggcttgcggtcggggtgccgccatggggagggcagagacaccagggcgctatggtgctggacatccatgttgtgtcctggggcccgcgccctggtggggacactgctgccaggcgtcgccctgggaaatgcagatttcgtgtggccagatctttgatgtttctgaagagctgggaatccaggtttctctggatttggcaatgttgaaatgttggtggtcaattctaatttttatgactcactttgctgaccagaagatgcagctgtgggcctgcgaggcctccggcaagtgggatttggctcccatcacaggcagcagattggagcctgaggcctggttggaacatggcttgttcccttgtttctggaaggggttggtactcagtggggctgcgcctgcccaggaagatgggcttgtgtcctggctgctgtagagggggtgggggcagcccagcctgaaggttgaggatggaggtgtcttccggggggtgacagtggggatctgggggaggctgcccgctgcccgactacagagaccctgttgctgcctcaggaacccctctggagactggggcctgcgtgcagtgctttagtgaccatcagccctctggtcacctctgtgggggcctctgcccaccttgttgttgttggcacaggcaggctggtcccctcccatctgcagaaggggttatggggagggcgtgagccttctgggagaggccgaggcgtgttcctgcagagcccacggcagacgagggcagtggttggtttgttgttgggggaggagaaggggaggtcggggtggattcctggaagatgggtgacactgagactgtggcggtggggccaaccccacgaggggcctggagctctaaggcccttgggtcctccccaggtcaggccaagtccatgagccatcgctgagcagcccccagggagggaggggtgtgagcgtgggtgggctcccggcacctggcccagcatccacgcctggtgtgtgggcatctgcctgcagaccctcgtccgagggccccgtctctctggacccctcactgcaggtgaatagccacagtccctcccccaggccctgccctgcgtgttggaaacaccacctcctgggccttccccgtttgctcattcgggatccttgtctgggcactgaggacgatgagctccgcctctgttctcgcgtcagggctcggctcctccgtgtgtggggagacaggctgggatagcatgctgggcgactgtggtgagggcaaagacacagagggcatgagtggggggctgggggggcacctggatgttcagaggccagaaggcaggactacccgcaggtgcccaagggagacccagggccgcccagaagtccagggggagtcctggggcctcggagggatctgagcagggctgcggcctgacccaggatctctctggcctccctggcgtcttcccaggtggcccaggaccgcagtaccagactgagctggactggcattgaccaggccgaggccaccggccatcctcctccggccagaagctgcagtgataggggacatccctagcagttcacaaagctgtggggagaccccgagggggaagggtttccatgctgagccacaggcccggccacggtgcaaagctgtggggggactccgaggaagaagggttttcatgctgagccacagtcccggccatggtgcagggatttggcacgaagcctctcctagggccggtacacgacctagagggctccctggtgtaccctgggacctggcagagtgcagcttctcatccagcaggggtgggtagggccctggactctcctagggcagcactgtttaataggagtgttatgtgagccacatatagagttaagaagaaataagtaaaattcattttaatgaagtattgcgtttcactccatgtactttgaaaatagtatttcaacaatgtaatctatataaaaattgtcacatcttttttactcttttttttgtagagtctgggaaagccagcaggtgttttacatttacaacacttgagtttagactggcagcttctgcgcccaataaccacaaggctgacagcagggaggtgtggggggtccagaacaatataccctctgtgagtgcttatctcatgcccatgctgttcccaggcgcctgctgtctgtctcctcatcctctacctcatcggctctatggtttgaggccagacctcatgcatcaggccagagtgtcctgccgagacccaggatgcacccctcacttggcacagacaaaccagacacaccagcttctgtctttccccatttcagtgggtgaacctggaaccacccagatgactgggctagaagttgacagtcattctcctctcctcactcccctgtcctcccacccagcacacccagccaggcaggtccttagcttccacctcctgaatctctgacctgaatttcactagaaaataaggaatactacgtcaaaatttatgggatgcagctaaagcaatccttaaaggaaaactagcttgtgcttatatgggaaaagaagaaaggtctagaatcttaaggttttaccttaagaaaccaaaaaaaaaaaaaaatggaaggtttgtaaacctataaaggaaagccatagtatagacaagaacagaaatacagaaattaatgaggcaggccaggtgcggtggctcacgcctgtaatcccagcactttgggaccccaaggagggtggatcacttgaggtcaggagttcaagaccagcctggccaacatggtgaaacccgtctctactaaaaatacaaaaaattagccaggcacggtggcgcacacctgtagtcccagctgcttgggaggctgaggcatgccaatcacttgaacccaggaggtggaggttgcagtgagctgagatcacgccactgcactccagcctgggcaacagagtgagactccgtctcaaaaaaaaaaaaaaaaaaaaaattaataaggtaggaaacagacaatagaggaaatgaacaatgccaaaaggtgttttcaaagttgagaaatccctagctagatcaatcagaaaaagaaaacacaaattatgaatattaggaacaaaaggggaaatatcattacaggcactatagacacgaaaaaggtgaaatggggacaattttattccaacaaattcaacagcttaggtgaagtgggcaaattacttggaaaacaaaactgacacaagatgaaatagataatccgaatagtcttttttttttttttttgagatggagtcttgctctatcacccaggctggagtgcagtggcacaatgttgcgcaagctctgcctcccgggttcaagcagttctcctgcctcagcttcctgagtagctgggatcacaggcaagtgccaccacgcccagctaatttttgtatttttagtagagatagggtttcaccatgttggccaggctggtcttgaactcctgacctcaggtgatccacccacctcggcctcccaaagtgctgggaacaggcgtgaaccaccacgcccggcttagataatctgaagagtcttacatctgttagatggagtttctggatgtccacgttttctgtcttcagtgccacctcccccagcctgctcagcaccctgtcgccagcctagcctaacacttgaagtcttttctgatcgtaccaggcacatttccaccagttaacatgcatcagcttgtttaactgcaaccctgtaactattcccatttgccggatgaggatgctgaagaaaaaaagccgcctgtaaataacttgcccaaggttcacacagtgagcagctggaccaggattcaagcccagcggcttggctttgttgtggaatctgtaccctgggccattacctggagggcagctttctgggcctcagttttcctgtctgtaaaacggggatgttactaaatagttcatttgttttcgggttgttgagatgataaaatgagctaacatgcaaggtttgtactgtctacatagctgccatgatgatatcgattcctgcttttattattatgaattctcagagtaatttctcccgcctcctgggcccagcctggctggtttgaggcccagacgctagaggcttatctttgtcccggttgccaggcaagggtcctcctgtgcagggcctgtggagagaggcactcagttaatcagtgccttagacactgggcctgggcctgccacctgcagggagcagcaggctgggtcacagggtcctagagcttcctcccacctgacagggccctcctacaaaccaagagttggtccaggggaaggggccactcaggagggctgggggccacgccggccagggtgctgttaggtgggagtggaagaggaaggctgagcacctgggcctagcaggcactgctccccacagcctggggctagccgttccggggcgagcatggccacctctgctttcccagcctcactctggtcgggaaggctcttccgactggcatccattttgtacttttggtcattccgcccctgttctgggcctggggctgcagtgacaaacaagacaagtgaccgtgctgccctcgagaagttaaactataactgggacaacagcagagcgggtggagactgttctgagtgtgagcacagctgtgcctgggaaggagagaaggcaccgttagaccaggcggtcagggaagagcgctctgggtagagggtgtagccacccaggcctctggtggcgtgtgcctgaggagccgagcgggcatggggtgggcagacagggctaaggaggggcctggtctcatacagagggaaaccactgagggttttaagccagggaacaacgtgagctcctgtgtttttacaaactcgtgggggaggcagcacggttgtgggggtggtggcgcctgtcgggaggctgctgcagccgttcaggagggggtggcagtggcttgaattaggtcattcttctgttggacagggcgccaactgagcaagaccaagtgatgcagcccaggcggcaaatgtggtggagccaggagtccagtggccccaactccagagctggcggcacacacctgctggagtccactctgacacagcatagctgctgttcccacccctcctccggcacacaggactgcacaggcagggccttgcagacacttacctgcacttgcccacacacactagtgtccccaagagcctgctggcaacgcacttcctaggccttaactcagccagcatccctcatatcatctgtagtgtatctcatccatccatccacccatctgtccatcatccacctgtctgtccatccatccacccatgcatctacccatgcatccatcatccacccatctgtccatccagccacccatgcatctgtccatccacccacgcattcatcatccactcatctgtagtgtatctcatccatccatccacctgtctgtccatccatccacccatgcgtccatcatccacccgtctgtagtgtatctcatccatccatccacccgtctgtccatccatccacccatgtgtccatccacccatctgtccatccatccaccatgcatgcatgcatccatccatccatccacttgtgcatccatccatctacccatctggccatccatccacccatctgtccatccatccacccgtctatccatgcatccacccatctacccatctgtccatccacccgtgcatccatccatccacccatctgtccttccatccacccatctgtccatccatccactcaggcatccatcattcaccccatgcatccatccacccatacatccacacatccatccatccacccatctacctgtctgtccatccatccacccatgcatccacccatctacccgtccatccatccacccatgcatccatcatccacccatctgtccatccaaccacccatgcatctatccatccacccacccacccgtctgtccatccatccacctgtctgtccatctatccacccatgcacccattcatctacctgtttgtccatccatccacccatgcatccatccatccacccatctgaatcacaatagaagaaggtggagcagcgtactggagtgtcccgcactgggcgggcagtaccctgctccctgacactgtgctgactcagggaacacttggtctctcccaaacattgcctgagtccctgtttactgtgtctgcctgtgctaggtaggcaaggataaaagacagccccgcccactggatgcttacagtctactgaagagagacacagaaacaagcaaccccacttctcttttagagagacacttaggggactgtgggagcctggaggagctctttacctagcctggttggcatgtggagtgaatggagtgtcaggaacggtttcaggaagaagcagggccacagccatactgcgtggtgttagcctggaggaggggatggcatgctttgctaataccagggtcctggagacagacaacagagtttccctcattctggagcttctgactccccactcccaactctgagagtcgttctccttcccataggctatgcagtctcatacagctgggctgcagtgccacacctcaccagtaggtgctgccttcagctcaatgtgactccagcctgagcttcgagctgtgggtgctaagaagtggctacccctggctgggcgcggtggctcacgcctgtaatcccagcactttgggaggccaaggcaaatggatcacgaagtcaggagttcaagaccagtctggccaagatggtgaaaccccatctctactaaaaatacaaaacttagctgagtgtggtggcaagtgcctgtaatcccagctactagagaggctgaggcagagaatcgcttgaacccgggaggcagaggttgcagtgagccaagatctcaccactgcactccagcctgggcaagactctgtctcaaaaaaaaaaaaaaaaaaagtggctactcttccagtctgagggttgtaggttgagtatgtgtggaagagagcccagaggctgtgcaggcagcgtgtatgggtggtgaggaagttgggcccctcttccagtgcccccaccagcaggtacacagccttcctcgcactcctccagcaccccctccttgcacccctccagcacaccctccttgcacacctccagcaccccctccttgcacccctccagcacaccctccttgcaccctccagcaaccctccttgtacccctccagcacaccctccttgcacccctccagcacaccctccttgcaccctccagcaaccctccttgcacacctctagcacaccctccttgcacacctccagcagctgtgggagagctccctttccctggctgctcctgctgtctgggacgctccccagggctctcccatctctttctttgcagatggcaattttcccgaggcagcccctgctcaggttgaccccggaactgggtcacttcctttccccatcaggctcaccttaggagtacaagttctggagcagcaccagtgactgccacaaagcccctgccctccaaacgcccgagggtggggacaacagtccacaaaacagagcaggatgcagtcgctggtgtcacgtgctgtgggtgcggcatcggctcctcccgaccagggacatgagcccagcccccaggaggtagcagcaggggactgtggtagggctgaaggcagggcgtagcatctgcctgcaagtccctgtggcctgggcaggttcgggacagaggggccccagagtcgggctctgctcttgctgaatgtgaggggcccatagtcatcatccatggctcaaccaggcctggggacactgtgagggctctgggactgtcccttcgggagcgaaggcagcggagagaggtaccacccacccacagttgtgccaggcacctgctctcaggattcggggacggctttgtgggctcccaaaacaggcaggaaaccaggaccagctgggagctggtagggactgtgggaggtggggaaatggagtgttgtggacgaaagcagccactccctctttgccctgccctgccctgccctgagccagggagctggacacccactgcagtcccctgaggctgctcaaccttggtgggtggggaacttggaaagtctcaagtctggacccatgacatccagtccctgggggaggcccaggagtcctgaaagctccccgagggagcactgtttgcactgggccaggagccatgttctaggggctcagctccttaagaggaagcgggagctgcgaggaggagggagcgcaggctgtggggctggggcaggggtgcgctgtgtccacactcatttccactcagacacggatggcggcagctccgcctctgcatacctgtgctccatttctgcaggggcgtcgcgttcccgtctcctgctggaactgtggcccagcccaactagggggtgtgggggcctgacctctgccccatctcccagggggcctgtccttggcctggcaggtctgaggaagccgtaggccccttctcagggttctccagggtctgcattagaacagcagcccaggcagcccccgactctcaccctcgctcccaggcctgcaggtgcagaggctggaggcatcgtggccggccagtctcagttcatgcccctgtaggatagtccttgtctgaatgtgatgccatgggatggggtgtgagagtcgccctggtgtgatccgattggtgtgagacttcaccagggctgcagagtatggctgtcagagttgtgcactgcaccgctccagggctgccattcccaccgtgccgtatgtagtgcgtgcatttgccctgaccattgcacattccccgggagggcaccttctgctcagtttgcacaagaggacacgggggctggtgtggggcctcttgggtgctccactttgggcggggcctgcgcaggacagtgcgtgcttagagccttggggcgggtctggggagcaggtggggcgatgagtccgtgtgcatggggtgaggtgtgtacagggccagtgtgactgctgtggtagagaggggtgtgggtgtgtgtatgcagccagcgtggcccctcagcctgccggcgcctgtgggtctgcgtgggtctctgtgtgcagccggcgcggcccctcagcctggggtggtgtgtgtgcctgcgggtctccgtgcaccctagagggtttcctggctgcatggcggggccactgctggctcccgtctctctggccccttcccagcaacaggacagctcaagggcactagaaccggacaggccaggccgcacctgagcccccgactgagcccgagcctcccagtggaaccatgtttctgtgggcaacccagaggcagtgatttttggacgtgcagcctggagctgggggacggtgtggagggagggggttggtgaggggaggggaccttgggggaggggctctgtgcgcctggagccaccatgttcctacggttactgccagaaccctcagggccccagtgctcctggtcccaccagcggctggtctgcggctgcccagtggagtgcagcttgtaggagcaggttgctgagggttcaggaaatttgaagccggctgttaaactgttagtggcttccatcagctttggtttggatactgacgtcacagaaactgacaggcgctccatgctggcccacagggagctgttcctcctgccctgctcctgctgcacgccccacctgctgacataactggacagactcagccttccttccccaccccaggaagcacaggcttggtggagcagcagggtgccctgtgaggagggcaactcagggctgcagtgtgtgtgctgggccgttggtgccgtcagtgagctgtgtccggggccctccccggcctgcgctgcctttccccccgcacctgccgcctggcagacggagccaccttctgtgtgcactgggaacagtcactcctttgtcactctagggggggcaggggcttgggtcggctctgctcactgcccagaacggtacctggctcgtcagggctccataagcatcggttggacgggtggacagataggtgggcagaccacaaggctggggtgggcacaggtgcagtagctcctgcccaccctccagggcaaaaggggccccctctggccccagacgtggacttgtcatccagggactgtgatcttgtccctccagctcctgctgggagtggacgtgtggcctccccggcccctggtgtggctggcagcactgagaagcggctgggctgagggcagccaccttggctgtttgaggtcctgcctggggacagagtggggtgaccaggacacagattcccagttctacagggtttttcgagacgtgggactttcagagctaaaaccggccacccgaggaaggggaagagaccccaccccacgaccggcctggccacctttcagggcctccgggtttgggaggagcacacgcagggcagcccaccgagcccctctgtggcatgggggtgacgcgttccatctgcgcccagccctgaccggaggtggcttttgtgtgggtgtgaagtgtagagaggtgccctactcctcacggctcagctgtgtgggtgtttccgacccacctcccttcccatcggccaggtgtccttgggcagtgagcagcctgcaccactatactcagcagccctgtggcagcctttcccatcgctgccaggtactgccctgagcctctgtccctagaagtgagtgcagggctcatggggccatcgccaatggtcagactccccagggggccggtgatacacggttcctggagcgggctggaaactcattccttgcaggctctgggagacgatgatgcattcccgggaccccgcgttgagaaccgctaggagtgggacacgtggcttcctgcagaggtggacagaacccctgatggccccagcagggcagcaagtgtgggacccggtgggcagggctgcccagctgggaccgtggtgccagctccgggggtgagaaaggagaggttgtgagagtccagctggtgacaacagtgacccctggtggcctggaaggtgccggccccgggctctgctgcacaggccgtgcctccacctaaacctcattgcaccgaggggccctgccagggttcccgaatgttacagttacagatgccgaaactgaggctggggcaggccagtcgcttgcccgaggccacagtgccaggaagagccgggcagcctggccagggcctgtgagggctactgtgcagctgagcaggtcactagcccaccaccctgcccccggctcccgcccagtaaggctcagactcctcggggctgcatccctgcccggccagggcctcctccagtgtgggtgcctgctactgtgcggcttgatggacctcatgggccgggggcatttgacctcaggggcctgggtgacatcccttaattcgcactggcaccgtctgccttgtgtgcaccctgtcagccacccagggaggcctgttgctgcaggaggtgcacagagcgggcctctggctgagccgaaggtcggcagggagccaggctcatggctgcagcgagccacaccagccagtcctgggacgggtttccccgggctggggcgtgctcctgacttggatgactcaaagtaaagaacctcaccaggggccctggcatgcgaggcctgggggcccagatgtgctggggcgtgtcactacaaggtgcagaattgttccagatccaagttggccagagagggagaccgctgggcttccacgtgagtctgggcgctggctgtgcaggggcgtccctgctgggcgctggccagcaggagctctggcctctcacttccctcagctttgtgcaggtttgaaattatttccaagtaaaaaaagtaaatacatgcagggctcggggtctggtccctgcatggtcacttaacctgtctgcgcctctgttttctcatccgtgaaatgtaaaggaaaatagtttctactcggggccaccgtgtgagcaaatgtgtgagtgtgtgcaaagcgcccgggccaggccctggcacgcatcggcgcccatgttggctggtgtcaggggtggtggcggtgggcgtggggcgtgggggtggggtgaagggagtatgggtgctcccttcagcaggtgatgaaactgaggcacggggaggccgagcagtggcccaagggcccatggccagggtcaggcaggtcccaccaccacctcgctgcttgctctggcatggagccgaccgaaggaggtgctgtgggcacagccaggggacagtgggtggcactgaggctcgacctggaggtcatagccctgtacagccagatggggtggtgcgaaccagccagggtgtgggtggaggccctgcctgtggtccctagcacccccaggatgccttcaaagtcagcggcttgtggaaggggcggctccaagcacgtggcggttctcgtgtcactgagccggtgggtcctgggtaggtcctccccgtcctggtagagtgtgttatcagtgtgtgcgctgtcagctgggatggcattcctggctgtgcagagctctgtcctgctgctgctcccgcccccagaccaggacccagcccaccacagctcgtcacatcccaaagcgcccagcggctgtcggggcgcctggggccggggtgctggggtgccgggagcaggcatgtagccctagccagggggccccgatgcggacgcggtgaggtgggggtttgcctgagacagtgtctctctctgtcccagatgaaggtcaccgtgtccaaagggggcgaccgggacagtgacgacgacagcgtcctcgaagccaccagctcccgggacccgctcagcgatgtgagtacccagctgcccgcgcccggaggctccgagtctgggccgcctgcccgctgcgccccgcacaagggcgtccagtccgagtctgggccgcctgcccactgtgccctgcacaagggcgtccagtccgagtctgggccccctgcccgctgcaccctgcacaagggcgtccaggaagccgctggttagggtccggtttcccaccaaggctttgtcttagcaatgagcattttgccttcgttaaagcgtgattttttactcattaggactttcccattaggagagatttaaatgaagaaatggtgagtgagctggcaggagcccagaggccaaaacgttaagccttggacgctgtgcctgcactgctggcctgtgggtggagggcaggcggacggccgccgagtcttgagatgggcactggcggggcagtggggaggtttctgctgactggaacttgaggcatctcattatcatttaaatgaaggcctcactgcccggctccccatcttgttgccacaagttaggaaaataggctgggaattacctgggactgccgctgccttggtttgtcctctaattgccagcccctggtgaaggaagtcacattctgggcacaatgcagcagctggggctgaggctcaaactcagggcaacgaaggccctcccacccctctggcagctgggagctggcgggtgggcccatcgggacccagggccttgggctctgtcccctgacatcctggggcccttcaggagctgacctgtccccggcaagggtctgtcttgggaaggggagggggtgtcctccctgactctgcagtgggggttgtggattgatttgggagagtggaggactgccgtcagctggccccaaagccctccttttcttcctctgccttgcccctcagagggggtgttggatctttgcatctgccccccactcctcagggggctctggaccctccctgtgagccccacttgcccagctcagtgacccaccccatccactacagcagccctgagcctgtttccccacccctcctgctgggggaggccctggtggtctgagtgtgtagctggtgtgatccatacctctgtcctgaagacctcacaacacccactcgagccagagggatccaagggtgtgggggacctcagcagcccctgcaggccagagggatccccaccagaggtgtggggggcccctagctgcccctgcagaccagagtgtgccctgatgtctgaggggcccccagctaccatcccccagccccaacccccaccacctgtcaggcccctgtggtgaaccctcctttgagggctccatctggtacctcctcccggaagccttccttgtctagccagggcaccctccccaaagtcctgcaaccatggacccctctggcgggtgggcacggagggaggtcagcagaagctggggccctgggctgacctcccccaggtcttcctgcctcctctgaggagcatttctggtggggccttccctcttggggacagggagctagccaagggcgtccctgtgggagcctcctcgggtttggatcccagagctgctgcaggggagcctcagactggctgggcccctcaggaggacgacagcccctggggaggaccccaccacgacgcctaactctgtcctcctccctgcggcctcagccctcgtggcccctgcctgagaggatgtctcgctggtggtcttgggtctgggcatctggacctgtccccatccgagttgagggctgcggggctgcggggcagggttgagggctgcggggctgcggggcagggttgagggctgcggggctgcggggcagggttgtgggctgcggggctgtggggcagggttgtgggctgcggggctgtggggcagggttgtgggctgcggggcagggttgagggctgtggggctgtggggcagggttgtgggctgcggggctgccgggcagggttgagggcttcgggtctgtggatctgcggggcagggctgtgagctgcagggctgcggggcagggctaagggctgagggctgcagggcagctgtcgggtgcatccctgggagtttgttccgagtggcagcctcactgactgtcccctcttccttcctgcagagctctgcgcatgcggtctcggggagaggctactctgtaagtctcccagcacccctcctccatctttgtccccctggggccttaggaccaggtccccacctcacctgtccgaggccccacaacttagctcaccccagtcccgtgcccgctttccctctggagccccagactggttctggcctcaaacaccatggggttggtggggggtggacaagctccagagtgaagatttgggggtgcgtcctgctcacggtttgccagggggcccccaggctaacatgctgccccagggggacgggctggccctgtggctgtggccttgccaggagcctcagagtagtcagcctgcacagaccccagctgcagctaagggtgccgggatccgcggggccaaggccgggctgcttcttggggtcctgttgggggcctgggacatttggtgtgggaggtgcccatggtgtgagcagccacctccaatgccctgaccggcacctgcctcaccccggacagaaaggcctgggcccaggctgggcaacacccagggagccagcaccccgtggcgggcagggggaaggagacctgtgtgcagccttcatgacgggtgtgtgcccagggggagcgggtgtgtttcccggggggagcgggtgtctgcctggggggagcgggtgtgtgtccgggggagcgggtgtgtttcagtgtgtgctgtgcctccccgtgggtgcacgggtgtgtttcagtgtgtgcctgagagaagcaggtgtgtttcagtgtgtgccgtgcctccctgtgggtgcacgggtgtgtttcagggtgtgcccgggggaagcaggtgtgtttcagtgtgtgccgtgcctccccgtgggtacacgggtgtgtttcagggtgtgccatgcctccccgtgggtgcacatggcacggtggagggctccttgcacatgtgcctggacttgctgtgggaatggcctgggaggctgggcgccgacccctgccccccggacctggaggcccagcaccatctccccggcccccatcaccactgtcccctgccctcctcatgactgtgtttcattttcccttaagtatcaggaggaacattaatgacaacataaaacccagagctccataaaagccatttctacagattgacggcctgctgggctcgtgggagggtgggggcctggactctgcccaccccatccctgcagcccccgaaatttccaggccgtagaggctccctcactaaaccacagcagctttttatagggtgtgtaattaaaccaggaatgacccagtgtggccaggccagaggggacacagcctggtggggacggccccccactgtctctgtcccacagcttctgctggtggcagagcaggaagcggcaagggagcggcatgggcggcgcggccacaggccaggagtggaccccaggatccctggacccagcctcatgggcaggaattggccacttggctgggtcacagcaggggctcagccaggccctttgcacccccaccccagctcccctgaggctgccctttcacctgaggttctgtctaaagccctgggctcagctctaccatcctgggctcttctctgccaccctgggctcggctctgccaccctgggctcttctctgccaccctgggctctgccaccctgggctcttctctgccaccctaagctctgccaccctgggcttggctctgccaccctgggctcggctctgcacccctgggctctgcccccctgggctcttctctgccaccctgggctctaccaccctgggctcttctctgccaccctgggctcagctctgccaccctgggctctgcctttggcctctcacctggtttggcccagagtccgtgagctgttgacctggggtggctggagctcacttctgggcagtggttcctggagcagctgcctgcccaagggccctcttcctagggtttccttcctcctgtgctgcatggggtctcaggcagccttgctgttgtcacctgtgcgcgggggcaacccctcagaggtggctgtgggtgtcctgacagccatggtcatgagtatgatgacactcctccgcccttcccattgtcatgagtatgatgacactcctccgcccttcccatcatcatgagtatgatgacactcctctgcccttcccatcgtcatgagtatgatgacgctcctccgcccttcccatcatcatgagtttgatgacactcctccgcccttctctgggcagtgtcctgacagaccagctcctggtgtgcgtgttcagggtcagagtgtggaaatgggctaaggccacctggctccggctgctgggaggcacctgggtcaagtggggtgtcctgatgcagactccatgggcaggaggactgtggcccccacataggtgccagactgtgagtgtcagtgacatctccgagtgctgggcaggactcctgtcggctcactgtgggtcagggggagggccgggtcttaagctctggaaggtgggctctgccccctgttgctggtgaggtgtgcacgtggccacctcctgtggccaccccagctggtctgaggtccccagggcacctgggtctctctgccctgagccactgggtgcccttctgcttctgggtctccactcattattcaagtcttctccccagagcactctgtgtttcctgagaaagcccgttattaacttgccagctgcttgcagcttaacccccacagccgaggcacacaagtgacagatggcggggtggggggtggggctggggggtggggggagggggaaggggggaggggctggcctgctgcactggggatggggttcccctccaagccgcaggagcctgggaggaccctgagggctgcagagggtcctgtgcgtgtgcactgggccccagcacacacatacctgtttcagaccctggtgcatacagatgggccctgccatgtgcaggtgtgcacccggggccttggtccagtgtggccctcagttgcccatgctgtcagccctgcgggccccttgtgtccagtgtgggggggggggtgcaggtgagagcccggggtgcaggtgagagcccaggctccaggcagagagcagggaggtgcctggcctccttggaagtgctcttccccggcactgaggactggaggcaggtggaggccagaccaccccaggggtggaggaccaagaaccggtcccatgggacgcatgcccaggagcaggacaggacccaggagcaggacaggacccaggagcaggacaggacccaggagcaggcgaggggcccaggcgagggtctggattgtgctgaagcctgggacccactagtgggggtttgggacttccctgaggcctcagactcctgggttgctccctaggctgaggctgccatgtgtgtgtgggcgtgtgtgtgcatgtgcatgtgtgtatgtgtgtgtgcgtgcatgtgtgcatgtgcgtgtgggcaggtctgtgcctgtcctgtgtgcagctcgtgtccgtggtacccccgtgtggtgggctgcatggggctgtgcgttgccttgtagaacagtgtcacgggttcctctctgggcctctgtgtgtgcgtgtgtgtgtgtgtgtgcacccgcgtgtgtgtgacctgtgtttgtgtgtttgcatgctgtgcatgtggcattgtgttgtgcacatggcgttgcgtgttgtgcacttggcgttgtgtgttgtgcacgtggcgttgtgtgttgtgcacgtggcgttgcgtgttgtgcacgtgtgcaccccttgccacctgcctgtgactggggcctccagcctaatgagaaggcacagccaggccagcagcctcccgtgttgctgagtggcacaggcattcatcacctggtctggttttatgaaccatccttagagtggtgtaattttgtccacattggtggccagcaaagccccagctattgctcatcctcagcagcttgtgccccaagtgtgtggtttggccttctcagccaccgtcagtgctgtaaggtagagttgcttccacccaaggatgtggtgactgactccagcgtggcagggggctagtggatcgattagacagaatgaggatccacaagagcttgctggggttggagccattcctgccggcacaggaccctggcttgccctcccacacccatgcacagaatgttctggaggggcctttggccagcaggagccagagtgaggggctgggtgagctgcagggtggtggtggcagcccatggtgaggcccaggcctcagggacccatctcaccctgcacacggcatttagttaccagatcatcccgttctccagacaggatcacaggcccagagaggccaacagggccccccacctcagtgactgggagctgagaccctcagacctccctcaccactcggccatgcccacccagaattctcctccatgcggctgcccagccccttgtgcccatcaagaagagccatctgcctggctatgcccacatgccctactctgcccccagtagcacccacttggccacagcccccccaggcccttcctgtccccactggcaaggtcctccatcagggtcacagatgcccaccctgcacaaactgaggtgtggagaaatccgtccccttgcctcccctccagcccatgtgtgctgagcgtgtccatggccgggcatgcacacagggagaaagatgggaaagacctgggtaagggaagccaaggagtcgctgtcccaggcggggtgttaagcgcagtgcaggagggtgggagggggggccaggccagccgaagcaggcataggtttgaacagaggggccggtgagaggccctgaggcccctgaggaaggagcccaccccgtgtgcttgggggcatgcctgggacagggaggctggaggtgggtgggaggagcagagacccagccaggtgggacactgcagatgcccaccagccgctggggtcccgctgccctcgctctgtgccagggcccgatacaggcgctgtctttacaaggcaggtttgtgacactcattacggggctccttgggcctcttctgagcagccacaacttgtacagaagcaataaaaacccatcagcctctccctggagtcagagagccacggtctcctcccaacccagcctctccctggagtcagagagctgcagtctcctcccgacccagcctctccctggagtcagagagctgcagtctcctcccgacccagcctctccctggagtcagagagccacagtctcctcccgacccagccacagtctcctcccgacccagcctctccctggagtcagagagcctcagtctcctcctgacccagcctctccctggagtcagagagcctcagtctcctcccgacccagcctctccctggagtcagagagccacagtctcctcccgacccagcctctccctggagtcagagagcctcagtctcctcccgacccagcctctccctgtagtcagagagccacagtctcctcccgacccagcctctccctggagtcagagagccacagtctcctcccaacctctgagcatagaagggtctttcaggctggctgctgtgtgggtaccgtaggggtgggggctgagccatgtcctcgccccatggtgggcacagcccgcacccatctgctcacccatttgtccatctgcacccacccacatccatgcacttaccacctgtccctcgtctgccacccatctgtccgtccatgccacagtgatcatgtgcctgagggcagtggcctcagcacagcctgactctgggctgggctccatgccaggcactgggttgtgaggagcacgtcacacagggtccctgcccccagggagctgccattccagaggggagaggagccagtcagtaaagagagcagcagctgccaggtcggaaggaaggtggccggggtcagggcagcatctcagaaggggcaggccagggtgtctgagtaggggcaagcctgtgtgtgcagaacctgaggcgggtgggtgccactgtgggagagaacagggaggggtgcaggggagctgggccgtagaggatgggaggctgtgcagatagtaccactatcccccaccaccccaggctaagtgacaaaggggctgacccacccagtgctgagaggggcagggtccaggccaggtttgttccagcagcccaagcaccaccactcagccctgggaggtcagcatgggggcagcagggacttggggtcctgggaggtggccatcctgccgtccgcctccactccagtcctggcctccatgggctgcgggagggtgggacgccacgtgcgttgtcgggccccaggtgaagggagtgtctgcgtgtgagaacaccttcatctccatggcatttagatcatctgactcctccacctgtggtatttgattgcaaacaggtgaggtccatgaggagacctcgcctccatctgcagatgcggaagccgaggcccaggcatcagctgcacctgtcgcaccctctgccagggcggggtccagatggggccaatggatttggtcccctccctgtccacctttttctcctcgccacctccctgccccacatgtgcccacacagggctcacttcccgcagcgggcacgcgctcttttatctcctgttttgtgggtcagaattgagcaaggctcagcccgggtggctcctccatgctgcactgtgctcactggggtctcctggggatggtggctgggctgggtggagggttcagggtggctttgctgacgtgcctggcttctgggccttggtggctcaaggcccaggcagctgtggccagcccttgcagagccttagccaggctggcagcaccattccagcacattctgcaggtcagagccccccagcccagcccaggttctaggggaggggttggaccctggcctggaggggcctcatgagtgccgcctttcaccccacccacagctccctgcagcgctcccaggtatgggggccacagccatccaccaggcaggacagccccacagggcagggagatgcctgaccaaggagggtggcacaggcagtgaaggtggcggcgcacagccctgctggagagggccaggccagagtctggggtgcccatcaagctgaaatccaattatgagaacaggccgggctgctgtgacacgggggttaggaattaatgttaacactgtttctggttaagactttttgtgttgataaataattcatgaggcagttagcactttgagcctgacaacacgagaatatattaatacggtcggctccaagaaaggtcagccacgtgcttggggccagggggccatcttttattcattccctgacacaggctcattaattattctggcccagccggagctgtgctcggagggacactaatgagaaaaaggagagtggatttgagatccacacgccatccgctgtggggacgtagagggagagatggaaagaaacactggtgaggcctctgaggcgggatggggcctgcagcctggctccctgacagtgctggttgggtgtgaagaggtgagcggagctgatccgcaggtgtgtggggcactggctgccacatcccagctctcccagagagatgaggaacaggagcagatgcagccagtatcagagagcaggaggtgcatggggaagtgaggctgaggctgtgggtgccccaagcacactaggcccagcgggtgcaggaacccccagagaagccactgagcagagacccagaggggaggctcgcagggccagcggttaggagtcctgcatgtgtgcacgtgtacatgacagtgtgagtgcacgtgtgtccatgatggtgtgcgtgagtgcacgtgtgtccatgatggtgtgagtgcacgtgtccatggtgtgtgagtgcacgtgtgtccatgatggtgtgagtgcacgtgtccatggtgtgtgagtgcacgtgtgtccatgatggtgtgtgtgagtgcacatgtgtccatgatggtgtgtgagcacacgtgtgtccatgatggtgtgagtgcacgtgtacatgatgcgtggatgtttgtacatggtgtgttgtttacatgtacatgacagtgtgtgtgccacgtgtgcatgatagtgtgttctgtgtgtacatggtgtgtgtgtgtgcatgtgtacatgacagtgtgccatgtgtacatgatggtgtgtgagtgcacgtgtgcatgactgtgtacacgatggtgtgtgagtgcacatgtacatgatagtgtgtgtgagtgcacgtgtaaaatggtgtgagtgcacatgtacatgacctcgtgccatgtgtacatgatggtgtgtgagtgcatgtgtacatgacggggtgtgtgagtgcatgtgtacatgatggtgtgtgtgccacgtgtacatgacaatatgattgtgtacatgatggtgtgtgtgccatgtgtacatgacaatatgattctgtacatgatggtgtgtgtgccatgtgtacatgactgtgagtgcatgtgtatatgacagtgtgtgaatgcacatgtacatgaaggtgtgtcgtgtacatgatggtgtgagtgcatgtgtacatggtgtgtgctatgtgtacatgacagtgtgtgtgccatgtgtacatcacagtgtgtgagtgcacgtgtacatgacggtgtgtgtgtgagtgcattgtacatgatggtgtgagtgcacgtgtacatgacctcatgccatgtgtacatgacgtgtgagtgcacgtgtacatgatgtacatgacagtgtgtgtgagtatacgtgtacatgaaggtgtgtgtgccatgtgtatatgatggtgtgtgtgagtgcacatgtgtatgtgaaagtgtattgttatgtgtacatgcgtacgtataactgcatgtgcatgcatgactgcatgtgagtgcacgtgtgtacataaatgtatgtggctgtgcacatgtgtgtacgtaacggtgtctttgcatgcatgtatatgtgatcatgttgtgccatgcctgtgtggtaacgatcacagtgaggccaggggctctgcaggcactcgggggtcttcaggctgacgtggggtggggtagagtggaagcggctggtggccagctcttgtcaccaggaacccccttgctgtgtggagacagctggagggccagagcacaggggccccaggtggccacgctcgacaggatgtgagggcagagggttagggatggccgccctgtcgtgtggtgggtgccctctgctgtgggtgtgaagcccacggagtgtgtggccagggacatgtacttaacaggaagaggtggcactcgggtgtagaatggaaagctgttcagagtgagactgttcctgtccagtgtgtgagtcgggccgagcccagaggtggctgaggtgggtgctttccccacccacgtcccatggcgtcacagcacaaatgccagtccagcctgtccagtgtgtgggttgggccgaacccagaggcagctgtggtgggtcctccctggcccgtgtcccagggcgtcgcagtgcaaatgccagtccagatgttcctatttgtggcagtcgcgacttgagaaaattaaaggtgattttgtgcattttaaagcatttagacccaaggctcaggtggtgctaagcaggtgtctaattctgcacatgtctgatggaatgttctggaattgtattggggctgggcagtgctcccttgaggactggcccccagcacctagtgccccaatctttgtgacagttgggagcccccacgaggatagttttgtcccctccaaccacagtgtggggcaacaggcaatgcggacttcagagcccaggccgcccacacgtgtgcctgctatgtctccagctaagtggaccccatggatccttgggaacaggatccatgttctcaacagacaagaccatggataacaaataagcagctgatcggagatcatcgctgggtgggatcagggtcctgagcaggagctggccacactcgtgtgcaggcgcagtggccaccactgcacggagagctcgggggaggggccgcagagccctgagtgccaggaggagccagactggctgggactcgaagaagagcattgggggaacgggctcacccagatccctggtcagagtgagcttgggtgtggctgggctgaggccctgtgacccaggggccggtccctggggccaggcctgggagggagttagtttgattcataggaggtcctgagacggaaggggcctgggagggtgtgttctccagctgcctgtccttctaaccagggctccagccccacgttctcgccgacgcagggctctccaggcctgctcccttggcagctctcagggaaagttcagaaatgcatcgggagatcctggggccagaggcaggggtgccagccctgcagccccaccactcccctttcccatccccagctgtctcttcacgggcctggactggaggtcaagggctgcctgagtcctgcaaggcccaaggcaagcacggactgtgccaggtgcactgagtgggggcctccagtgggcgacgcagagcccagagctttccctggcagtgatggccacggggccgccacgtggcacagcctctcctgagggcttgagcccccaccgggaggcaccctcgcaggcgggcgcacagcccatggggccttggcactgtggggagggtgcacaggcaagtccggctctggcgtgtctgctccagagcctcactcacctgcagctcctggaggctgtggctgttggctgcagtgacttgattgcttgttaattgctcattaattgggtaattagtgctttgttgtgctttgaagcctaaatactcataaaaactgaatttgctgagtaagcaaatatagcatttttcttcaggacccaccacccggttatcttgtgtaaccaggttgcaagggtgcctccacctcccaggacagcgagaggaaggtgggcctcagtgtggcggggccctgaccggagggtgagagtggcctccagggcttctgccacagattccagagcctggattcaggattcagaacccacccagtcacccccggtctgtgccctggtgggctcccatgcactcagtcctcagtttccccatccggcagcaggtgggtctgtggcgacttgcaagtgagcccagtgtgagccgcatccccacacactgcccggcccccacccctcgggctccatggcagctctttccaggcgcctgctcttccagtctccagagaagaaaggcctggggagcgggcggagagtgtctatgctaggatcagggtcagagagggaggagctggccgtcaggtgggccaggaagcctcagtcccatgccccggccctccagcccgatgcccacccagtcctgccctccagcccgatgcccacccagtcctgccctccagccccatgtccacccagtcctgccctccagccccatgtccacccagtccagtctcccagccccatgccccacccacccagtcctgccctccagcccgatgcccacccagtcctgccctccagcctcatgcccacccagtcctgccctccagccccgtgcccacccagtcctgccctccagcccgatgcccacccagtcctgccctccagcccgatgcccacccagtcctgccctccagccccgtgcccgcccagtcctgccctccagccccatgcctacctagtcctgccgtccagcccgatgcccacccagtcctgccttccagccccatgcccacccagtccagtctcccagccccgtgcccccacccacccagtcctgccctccagccccgtgtccccacccacccagtcctgccctccagcccccatccacctagtcgtgtccttcagccccatgcccacacagcccagtctcccagccccgtgccccacccacccagtcctgccctccagcccgatgcccacccagtcctgccctccagcccgatgcccacccagtcctgccctccagccccgtgcccacccagtcctgccctccagccccgtgcccacccagtcctgccctccagcccgatgcccacccagtcctgccctccagcccgatgcccacccagtcctgccctccagccccgtgcccacccagtcctgccctccagccccgtgcccacccagtcctgcccttcagcccgatgcccacccagtcctgccctccagccccatgcccacccagtccagtctcccagcccctgcccccacccacccagtcctgccctccagccccgtgtccccacccacccagtcctgccctccagcccccatccacctagtcgtgtccttcagccccatgcccacacagcccagtctcccagccccgtgcccccacccacccagtcctgcccccagccctctctcagttgaccccaggtccctcccgccaggtgccacctcccctcggccttgggccccattccctgtgggccaccctgagagtgcgcccagctggtcccggccacctacccaccctggcccgggccacctacccactctggtccctggcacacctccatctggcctggtgcagcagcagagcccagccccacactgtctcctgcacccaaccctgccagaatggaggccagacatcccctctcagtggactccacacgccccctgacccgcccaccacacactgtcactgccagccatcccgtgggcttccgagccacctgtggtgtgtgtggcgcctgctctgggctcaacacatcagcacctggaaccaggctccagggcaagcccactgctcactgcacctgcctcacccgggggggcccctccccgatggcaggaggactcccagccccacacctatggccccacaagcccagatccccagatccccagatccccagctctgagtcctgggctcagctccaggcccttgctgagtagccatacagctgaagaaagttatttccctctgaacctctgcttcctcacctatgaaatgggctgatactgctgtgacactgggggtacagcctcccaccacacccctaccccaaggcacgtcaggtgcaaatccactgtgagcctggggggcagagccccacaccacacccctaccccgaggcacgtcaggtgcaaatccactgtgagcctggggggcacagcctcccaccacatccctaccccgaggcatgtcaggtgcaaatccactgtgagcctggggggcacagcctcccaccacacccctaccccgaggcacgtcaggtgcaaatccactgtcagcctggggggcacagccccacaccacacccctaccctgaggcacgtcaggtgcaaatccactcagtgggccccacccatccattctatgccagtaccgtggatggccaaaggtgcctcaccctcaagtgccagatttgggccctgcagctccagcacccacacccgtaaccccctgcccacgaggggccagcagccccgccagaggtcatgcacccccccaccccggggacagctgcccagctgcgtggggtgagtgcacaagtggctcccacctggcggtgcccccccaggcagcccagttctgcccatgcaggggaagggaagtggagcctgggctaagcccacatggtggaggggtgcggattcacaggactgaggcggccgaaaggggctgagagtgacctttccaatcgtgagacatttcacacagtgtgaagctcaactcgaaatctccccagctgctctcagccctgggggctgccggtgccacgccagcccctgtcccttatttcagccgaatcgcttgattggaatgcattgcatatcccgcccgagcgtgcggcccaaatgaaggtgggccccttggcactgccatctgggaagatggggtcccacagggcagggcacggggcccacagccactcatgcttctgccccatcccttccagagctgctccccccaccaccccgaaccatccgggttgctggagtttctgggctgcaggttcagacagaataggtgaagcagccaagctgccgtctgccccacgagggcccagcacaggtggcgcaggtggtccttttccccactcggcggcacgtggctctgtggcaggtcctgaggcacccacatgccacgtacagacattgggacacgtggcaggacactgagggcagaagccaccaagggcaggatgaccagatggcacagggaggggccaggaactggcacacgcaggacgcgccacggcacatgtgcacacggcagatgctcctcgtatccccgggcacctgggtgggcacgcgaggctcaacagggccccacggaggacacatgtgcacactcaggccacacatgctcagccagggtggggcttccgcaccggtgttcccagcagctcggcctctcacccgacactcaggctgggcctttccactccatcctgcccacaccttgccactgttagaggtacctcgggttggtgcaggcgcccgtgttgttggggtgttttttctgctggtgaggaggggtcagggccccctgccccaggtagttctgctcaggaaccttcatgcagtgcctcagagcagaaacccggccctcactggccctgcctcagcccctctcccacccactgggcccagacagctctcctggatgggaagctggggaggtggaagcagaggctggcagtgtttccagcacccttccccaatgctgggcctagaccctccgcaggacagccccttggcccctctgtctcctatctcctccccaccctgcctggtcggggccagacactgagggacccctgggagcagcaacctcagcgcagggtccctgcttatgaatttttcatgcctttgtttgagcagtgggatcaggcggcccctgagcacaccgaagccataattaacacttgcactgggaaggggaggcatgtgttctttgctgcttaatagccgtgctgctgatttgtgtctccccatgtgtggggctgacaggcagccccaaccccaacccgtagccgcccagggtctggaaggggtgcagggaggcctgggtgatgggggccaagccccctccaggctcttcgggtagcaagggtgcactgcctggctgtggggtgggctcagatgcctctgagggatgagggaagggggaggggttggtggcagtggtggtgacagtgacagtgaagatgacactgatggcagctcccatttatgaagcctggccgccagcggctgctgtcctgagcctgccacgcacgttgcctcctccgactcagaagccccatgaaggtgccactgtctctgcagatgaggaaacaggctcggagaaacgaagagacctttgccacggtgtccagtgtccacgaagcagtggggccaggacctgcccacgccgggctccgtgaagcagtggggccaggacccgcccccagactgagttccagggtgcacgttaactctgggctgtgcccagcattcgacaccccagggctggggcccagaagctgggggaggtgttgggaacccacagggagctgtcaggtggggatgcagtttcctgttctcagcaggaagcagccatcggtgctcatgagaagtctccaggtgctcaaatgttggcagccaattttaaaaaaataaatcaggccagaccaagcccatgtgcccccctacccagcttgtggctctaaaagccatgtctcaaggccgttgtccacccacgggtgagggtctgggaaggccgctaatggagcctggaggtgctaagcatccccaccgcatagccacatctgtgaaaacagtgacacgcagtggcccctggggtggttggggaagccactctcacggaggacgaaaccggtgcctgtgcttccgagccccactgcggctctcacacccagcccgggatggaggtggggcagatagagcttcccagggcctgggggagctgagctgcgggcttggggtggggagccctgactcacgcctggcctctgactcgtgccgctgagtggtctggaacccctgtcgggtgcctccctctggccaccccacaccttaggcgtgagggccggggccctgggcaggaggaaggaacagagcccagtggttcaggggcagagcctgcccccacggccaatcaccggaatcacccggctgctactccccaccccaggcacccgggtttaagtggtctaggggccccgagcctcggtgcggcttaaaaccagactgactgagggcgtgggtggagacaacaagtactgagaagtggtcacgagggccattattggatggtgaggtccgacagactcagaggggccttgtaggctggcagaccatggtacagggagctgctgcctcctggctgccattggagctcaggacaagcagagaaggagagacttgatatcggggtctcctcgtggctacaggaaggctcacctttccagccttggccatcagggtcatagacaagcgtgagcactgccagggctaagagactctaaaactcccagaccaggacttcacctacgccagggtaaatggcatcttctcgttcttggctttgtgggcagacaatgatggtgatgatggtggtgaggatgagggtgaggacgatgacctgatggtaacgacagtgatggtggtgaagataactgatggtagtgctgttgaggatggtgacgtgaggacggcgatactgatgatcatggtggtggtaatgaggatggtgttggtggtggtggtgtgaggatggtgacgatggtgatggtgatggttgtgacaatggtgatagtgattatggcggtgatggcgatggtgaggatgatggtgatggtggcaatggcgaggatgatggtgaaaatggtggtgaggatgatggtgacggtgatgagggtgatggtgatgaggatggtgatggtagtgatgatactgtcatgtgtataatgtactgactatatatcaagcactgccttagtgctttgcacatattcacttatttaagccacacagtaatcctatgagctgtaagggacaaccctgtaaattgttcctatttacagaagcacaaactgagacacagagagctcagggcctcgcccagcatggggccgtgcggcacggagctcagggcctcgcccagtgtggggcagtgcggcacagagcgggcgtcttctttggagcctgagtcttggcctcctgaccatgcccagcatgtcccttcggggcctggggtctgtcctctgctcccaggcattcctgcctatcacaaacccacaccagggtgacgttccctgagcccccgagcccagccccggcgccgtgaatggtcgcctcactcgggcagcttccgagaggtggatgtgtctctccttttctcctcgccctgattaattgcctcattcaatgccgactccactgcagttaaacattaattcagtaggacttaataacacgaattcattcacgcccctgcctgcgcctggctgacagtgccgtgctatttggttaatgagaggatccatgcagcgtcctctggtgcgcttgctggaaagcacccctcagtgtctccttgctgttggatgcattaaaccctcgcctgtgtggtcagcctggctgggtccagccacagacctgaaacccacggggagatccgtaaccaggtccgggcttgtgggagctgctggctctggcccatgggtctcggggccaacccaggctcaagcagggatctgggtgcggggataagagcagaggctggactgggcaggtggcccccaggccacgggtgcacccatgtggccccaagtgtcaggctgctctcgaggcctgattggccagaaccctgacagtctggtgggattgcagtttccaagtcaaaggctctgcagcgcaaattcagcagggagaggcctcactgggggtccccagaaatcccactgtgaggctagaagggcacctgactcccctgcaggcctctggatgctggtggggctgcctcctgtcccacctccagggcgcactccctctcggccctccccaggctccccatgtgcagagggcatccttggcacagtctcggctcctgctttgccctcttccggtcccctcagccctggcgtgttctggcatgttcctcccctcccctgcgctccccgcaggagcttgtggctttcccctgccccacgtcctggtctttgcttcctttgctcctggctgagcctgggcagttccatttcatactttcctcaccaaacaccaaggcccgcccatatcacagcaggggagatggaggactcagaggcccagggccaccagcaaagctggtctgcatgtcggggtcctgtggcccagcccttggtgagctccgcacctgcagcctccggggcgggatgggcccggttctgacttggagccctcagttcttgtgtggtgggccgggctgggcgggtgcaggtgggactgaggcccttctctacctctcaccctgaaggccagaccgggggaaccctaggagagggcttggccacggctgaaaggccagaccggggggaccctaggagagggcttggccacggctgaaaggccagaccggggggaccctaggagagggcttggccacggctgaaaggccagaccgggggggaccctaggagagggcttggccacggctgaaaggccagaccaggggggaccagcacacagccgggacagacagcctgggggagcctgtcagcctcaggagaccccccccacaggcccaccccagctgcccagcttccccaggggtcccagctggggtcccacttgtaggagccacctggagtgtgactcgtcatgcgctgggagcagcacgttctcgctgcagagtgtctgctaaagcgcatttcacaccgtactgtgagctccgtcgctgaacactcggcagccgcggctgcacatggagggtggctgtgcgtttggttccctgcattaacccagtgggctccacataggagggcgccgcccacacatccggctggcactcaccaccctccgtgcactggggggtttattcttccaccaggtcattcattcgacgtgaatgcctcataattgcagttgccaggaggggatttttccccttttgactgtttcgggggacattgcagtcagtgtgttcttcgtagagctctgcttactgaaaacggagaacggacagtcagtgtgttcttcgtagggctctgcttactgaaaacggagaacggacagtcagtgtgttcttcgtagggctctgcttactgaaaacggagaacggacagtcagtgtgttcttcgtagggctctgcttactgaaaacggagaacggacagtcagtgtgttctttgtagggctctgcctactgaaaacggagaacggatttgttttcgggattatcacacccccaccctaaccagccaagctgacaaatggcgctggcatcgagtgtctaaccctgagcggccgtggccctccgtgcgctgccagcccctcctctgcccccggctgtcctgaccccaggggctcccaggctctgcccaccatcaggagctggggtgcctggatctcccagcccatgtggtgccatcgatcccctcagggggtcactggggacagtggggctgtcctgggccggaggctgccctccttcctggtgtgaggaaggctctggctggcccaggatgggggtcttcatggccgccctgctctgagggtctggccagtgagggctcctctcgggctgcagggccagtcttgtccccatcgctggctagtcggcctggctgtgcccctttgtccatcccacccggggggctgtgatccaggtctgtctggtgcagcactgggccctggcccaggttcctcctaaccgccccgaccacctgggcctgctggtacctccctctcctggcagcagccagggccgccccacccgtgcccctgcagcctggctgctgccgtgccccggggggtgacactggttggtggggccccgactcacttctgtctctctgtccctgcagtgtgacagcgagagcggcccggacgacaaggtaagcccagcgtcctcctcctgggctcggctgacagccctgcccttccctgctgaccttggccctgtgaggtgggccctggagaccaggcagaagatcgggccttggggggatccccccgcccggtgggtgcagggggcttgtggcctcccaggtatgggggtgctggcctctcctggctgtggaagagcctgtccagggctggggccggtaccgtgtctggagggacacaggcccaggtgggcatcagtgctgccccagccaggagggtgccctgggcagggctgccatggggtcgagcacatcagctccagctcctgggcagcagagggcagctgggcctgtgccccaggactggccccatcagtcctgagggagcaggggcagagcccagcccccaccctaaacccggtggaccccagaaccaggaggtagatgcgcagcctatgaccacatcacagtcaccctcagtgctcaggagcaagcaggattcctgcagcctcagccaggagtgaaccccccgggcagcccctgagccacgtcccctcagcctcggagcagcctccgggggggctctccttctgccccgcttgccccagagccctgcggggaggaaccgtcacctgctgtggccgaggagcatcaggccccggagggcgaggaggccaggcaggtggcgtgaggtcccggcccgtaaccactgcacctcactgtctccctgtgactgccaagggctacccgggggcacctggacgggggtgagggccctgccagatgtgccaggggaatggtcaccccggcctcagggacggccctgcagaggcccgaggcggactgcatgtgtgcgacgattctcgccctgagccagggagacgctgccctgggtttccaggcaggtttttatgaatggaacagttccatgaggggtctgcacaggggttaggggacgcccactgtggcccgtggcctggcaggagctgtctgggctgtggggtctcacagctgagggcccggtgggggtccagatattggagtcagtggcggtggccgggggaggagggtctgggcggttcagttttcgacgtaccaagaagtcaaggtaagtcgccgtggaagccagaggccgcaccgtcgccgcggcctggggtctggggcaggcgccgtgtgggccgcagtgccgggctcagccgtgtctggggctccagcatcctgggctgcttccagccacgatgtccctgcccaacacacctctcctcgcccgtccgcagatggacactgttggggacgcgtcctggtggtcacaaagcccataggagtggcctcacccgggaccccgcgtggctccgcgtggccctcagcccctgcccacagcttccgcgcccgaaccgtgacgggcctaacatttcagatgagtaaccttgtcctgatctcaggaatgaaatgaggtcacgggcacccaggaaatagccactcaccccctccccacctcctttcatttaaaagcagtttttggggaagacaccctccacaaccaagggttgctctgagagaggcaggaaggaggggatttcgggagcctggggcctactgggggctccctctcccctccccgcctgccttaccgagatgaggcaaagccacctgtggccccggaggccaggtccacgtggagtcggcgatgccggcggggaaggctgacagccgcccccataactgcacgccccccatgtccagcaaccaagggtaacgccagcctccgagacccaaacgatgtctgtgcaggctgtgcctgcagagatgcggcccctgcccgggcctgggctggaggccgaggggtccatgggagagcacaggctgaaagagggttctagaatggggtcaggtggagtctgcacactggggcgtttatttctgagacgcccaagcagccccaggggagatgaccagctctgggcggtgtcggggaggctgagtccagtccagggctctgcacacggagggtcccggcagggcgagtttggcattcctgcacacggagggtcccggcagggagagtttggcattcctgcacacagagggtcccggcagggcgagtttggcattccgtgccgttggggccgtgttggggcttctagggctgtggtggccacaggtcctgaggaggacagcaggggagggagaggggctgcggaggacggcaggggagcggagaggggctgccagcctttctccagggcagaacttcgggtcacgcccactctggggagagcagagaggcctggcggggcggggacggagaaggcagctccgccaaacactgagtccccgtgatggtggctccttctggctgcggcaaggtctgagcgccggcgcacaaagcgggggcacggtgctggcagagtgggtgggacctgcctgtggccccgtttgcttctgttggggggcagctcccggaggctgctcggggagagcagcagggtgggccaggaaaactgcaggggcctctccttgttggcccgtcagcctgtccgtctgtgtgaccttggggcatgctctgaggggtgtgtcccaggctgactcaagacagctaagccagaggtggggacgaccctggtgcgttctgggagccggcagtgcatcctgggctgcagcggagcgagagagaggagcccagagccggcagcaggagtttccgtttccctccgagtgcatgggatgctgcaccgtaggactcccccgtccagacgtctccgtttccccatggcatccagcccctgatgctcagaaattagcttcctgagtttgggagagttgggagggcaggaggcctcaggtccctcctggtcttctctgcccggcgctgggttcagggggtcaggaacttacgctgggcggagggtgtgcgtggagcccatccagacgcacacagaggcgtaggcaggtgtgggaagtcagccagcaccccactggccgtccccagccctcctccctacccgctgggagcagaggcacccagatctctgtccctgggcactgctgtgcgaggccggcacccctgccagggagcaggcaggagggacagagccctgcaggctccagatggcagaattcccggctctgagacaggaacatgggggtgcttcgcatcagcagtgcccagagcccctcagcagccccgggcttgtgtggaacccgtctgtgaactggatatggaaggaaggtccccgagtgcccacatttacagggaccctcagagacctcactcagacctgggaggcccattgctcacatggcctggctgctcccggtgggcagaagatggagaagccacagacagcgtcctgcgtggggtctgtgggcgctgacccagcagccgtgcagggaacagccctgcccgcagaagcggatgccggggcaggtggcagtgcaccccgaggaagccttctggacggagtggtggggagggcgcgggcgcatgtctcaggccagtgcacttcacatctcatcccacacctgcgggtttgagcttggtttggggtgccagctcccacctggccagccaccccttggggactcaccctgggctctcctgccaatcaaggtggagactttgggacagccctcctccacgtgaacagactgaccgagacacctctccaccacctccctcacactgtgcccgcccagccgccccctcccctggcccttggcaggaggctccttggcagctgacgggaggctcgggcactgccagatggccccttcgcaagtcttcggtttgtgtctaaccactttttccttggaaaagtgtggggtgaagagcgatatgggactccataggcagccgccaggtggtggtggcctcgctcctcctgctgccgggggctgccacggccacctccagggatggctgtctggcccgtctgtggaagcccatcaggaagcacccccagtgccgggcctcagccaagagcaccggcctggaaggggcagggctgggggacagtggcatgaggtcagacatggcgtggggccgaccccgcaggcagcccaccatccacagcctccatgttctgtctgcaaaatggggccacagtggggcctgggcagaggagagaactgcccactgccccaagcacggtccccagagagctggaggccagccagtcctccacacccagcccctccccagcagacccttcttccagtggggcgctgtgcccgactgggtcctctctgaacctctgccttttcgtcactgaagttcgtaggttcttgttcttgggaactgtgagttcaggcactaccagcacgacagccagagggacggacggacggctggacaggctggaggcccctgccatgggcactcaccccgtgggacagacagaaggatggatggacggttggacaggctggaggcccctgccttggggcactcaccccgcaggatggacagaagggcggatggatggctggacaggctggaggcccctgctatggggcactcaccccacgggacagacaaaggatggatggacagctggacaggctggaggcccctgccatgggcactcaccccgcgggacagacagaaggacggatggacggctggacaggctggaggccccttccatggggcactcaccccgtgcgacagacagaaggacggatggacggctggacgggccggaggcccctgccgtggacactcaccccgcaggacagacagaaggacggatggacggctggacaggctggaggcccctgccgtggacactcaccccgcaggacagacagaaggacggatggacggctggacaggctggaggcccctgccgtgggcgctcaccccgcagttgctgggcctccgtggggtcctgggaaatttcaacagcagtccagtgtgcgggccgcgcctttgttctgtccagccagcggcccaggctgcgcctttgttgtatctggccgccggcaggccaggcaccttctgaggaagggttgctgcgtgtctgtggctcacggaggccttcctctgtgtgtgactcacaccccccacccaccccagcccacttctgggagcatcttcctgggggctttggaggcccatccattcttccctagggacaaaagtgcagggagcggcgtcccaggtgccaccgtctctggggaacgtgggccaggactccctttgctggacacagaccctgcccacaccgggtgaccgtggggtgacctcacagggtgtgtggggttccgaagccgccaccctccttcctgagcctgcactttgacctgggactgctgagcccagaagggccttgagagggctggctcagtggcacgtgggggccttgggtggttgggtccccgagacaggccatctcgctccttgtgtggcaggctgcggggccctgcttgcctgggtcccacgtggtagaactcggcgtttggtgggggcctgctggggacaggaagggacagcaccccaccctgagctggcactcatgcttcactggagccaggcggaggggccgagggcaccggcacaaggtgcagacgtgtcggtccctttgaggaccgagatcatgaccaccacggagcaagcgcccgggtcctcagatcaaaggcccaatagccagtgaggcttctctgcactggtcccagcagaagcggggcctggctgaggcagtggcatcagagactcggggcaatgggagtgcgaggggggtctcagcgtcccacagctgctgtaacaagtcgccgtaaacacagtcactcaaaacggcacgagctgatggcagcagtggagctggaggtccaggatgggtctcaccaggctgaagtcaaggtaccgacctcaggggaattggtgtcctgcctttcccagcctcagaggccccacttggctgtacctgggcagctgctccgctccacgggcctagcctcgctcacagggctccaagaacagagcctggatcgtcctgagggccccgtgatgtccccgtcacagcaaaggaagatttaggatgcactggaagcccagaagtccagagaaggggctcagagccatcggtcgccacggggcacctcgggggtcccacgaacactgcagcgggcgtcagaccctcaagcgtcggtaagggcctcaccgccttgggaggggtcagcagttaccggaggactctgggcagtggcagggagcagcaacaagggccccccattcaggccctcacccccggcacttggaggaggtgccgcccctgcctcggaagcctcgagggcaacctgcaccctcaggaggcccagctgggggcgtcactgcagggcaccggcagaaactggggtctgaaaacagcagcccagagtggatttggaacagaacagggtgtcacagaaaggatgtttcatgaggtgggttttgatgagtatgtttaaataaatgtaacttaattgatgttaaatatgcatcttaatgcttttctaaaatgtgcaattgggccagttgcggtgactcatgcctgtaatcccagcactttgggaggctgaggcgggcagatcacttgaggtcaggagttcaagaccagcctggccaacacagcaaaaccccgtctctactaaaaatataaaaattagctgggcgtggtggcaggcgcctttaatcccagcactttaggaggccaagcgggtggatcacctgaggtcaggagttcaagaccagcctggccaacgtggcaaaaccccgtctctacaaaaaatacaaaattagctggctgtggtggtgtgcgcctataatcccagctactcaagaggctgaggagggatggtcacctgaaccccggaggtggaggctgcagtgagctgagatcgcgccattgcactccagcctgggcgacaaagtgagactctgtctccaaaaaacaaaaaaaatgtgcggttggaactatatctcgaaatcggaaaccagacattctgaagacaagcttgtgtggcctttggcgccatcctgccccctgctgggggcgacctccaccgcagacgaccttctgagccctggtttccttgcctgtaaaatggagtagcgcctgccaaggacggctgtggggatggctgaattcaatgcatttgggggaggtacgtgtttcctgtgatttaatatttcacgaacgttaaacctgtgctgggcacagctctccctcgggtgggagtgtagctgtggtgtatctctggaggggggtcacggctttctctggcaggcagcatggggccctggtgtcccgtggcctccacggtagccgccccacccgagcgtgagcgtggcctccacggtagccgccccacccgagcgtgagcgtggcctccacggtagccgccccacccgagcgtgagcatggcctccacggtagctgcgccaccggagcgtgagcgtggcctccacggtagccgccccacccgagcgtgagcgtggcctccacggtagccgccccacccgagcgtgagcgtgggggccacggtagccgcctcacccgagcgtgagcgtgggggccacacccacaagtctggcatcatggtgttgggttcatgctccctccagaggccccagaggaggatccttcctgcctcttcccactcctgctgactccggcatccctggctggtggttgcattgctcctatctctgcccctgtccgtcctcacatggcccctcctgtgtgtgtgtctttgtgtctcttctcctcaaaatgacgccagtcctcggatttaggtccacctggataacctgggagggccccatctgagggtcaggatgggtgtgggcttggggcctgcaggcggccccacctttctccccgcaggcactcgtgcctgtgtaccagccttcagggccggttgtggcctcggggttccaggaggcgctgccatccagggcctcgggcacagcatccctgggctcttcccccagcccctggggtcctctcttctcagaggctttccctgggtttctgtgtttccgcgaagttccggtgccttctgcactttccctgggagctgaaattcgctaggatttgcatttccaggccggcagcctccagggatgctgagcagcatctgaacatccctataggtggttctggcttttgcttttctcccgacattccgggtggagatggtgaacacacgcttctccgggctccccctgatgctgccctcaggccttgggggtctggcctacccctcacctatgcaccacagccttgctcagagagtgcacacctctgcgacagacagaacctcagagtcgttccatggcaaagccacactgccagcgtggctgtggcctacacaggccgggcaacagcaggcgcaggccctaccccccacgccacgactcaaggcccaagcctgctgggtgcgtctgagtgttcgtcctgtgggacgctcctctccaggccttcgtgctgcaccccaacccctgtcctgtgggacgctcctctccaggccttcgtgctgcacccccctccacccacccctgtcctgtgggacgctcctctccaggccttcctgctgcccccgccacccacccccctcctgtgggacgctcctctccaggccttcatgctgcctccaacccctgtcctgtgggacgctcctctccaggccttcatgctgcctccaacccctgtcctgtgggacgctcttcttcaggccttcgtgctgcaccccaacccctgtcctgtgggacgctcctctccaggccttcgtgctgcacccccctccacccacccctgtcctgtgggacgctcttcttcaggcccttgtgctgccccccaaacccccgtcccgtgggaggttcctctccaggcgtgagaggacacggcccaattcaaggacacgtgccccgcggagtggcagccttgaggaagcagtcttgtggtctcctggccccagcgctcggctaaccatggccgaatggaggttgggtgccccccagggtggtttccagggcgatccggtgtcctggggtggctggggcagcatggctgagaggaccctgtgtgctctgcactcctggttaatggttggggcctccagcaccttcccatgccttcccatgatggcaccccctggccacccgctgcgtaacgatggcagacgcagttacagtgttggtttctgaaccgtaagctctggataaatgtgcctctgaacaccaccgtcaagtccctaactggattatgtatatttggcctggaagcctgatacttaatatcagcctgctctccggtgaatgcctttcttcccccggataatctattcccactccgcttccttctagacttctaacctcactacatctttcatatcagagctactctcctttctaaacaaaacacagacctgcccctggttctgagtctagtttcacccccaaactggggcgcagggctgtggggcggggctcggggctcggggctgggttttcggccccgttgacccaggccaggatctctgcctgttccaggatggtcagtgctgaaggcggcctcaggactgaggttagaaagtggggttggaagcctcgtttgtggcaggaagatggcttctcctgtgattccagtggtgaggtcccaagagaggagccggccacattgagactggccgtagcccaattggagctggccagttgctgcccctcaattccttcttcctgctcccccaactccccagccccctggggtctccagtcagcagggagagtgggcacagcttggcgggaccgaggcctgctgggcagccgcttcccgtgccctgtacccagagaaggagctgatggcagcacagcttctcagggggctgaggatgcactggatccatctgtgccgagtccccagagcagggcctggaagaggggactggggatggcatcctcccagggccaggcacgcaggaaggggctgagctagggttctgcctgagtctgtcttctctcctcccctccccccgcccgttccctctctgtgggcctcaccatctggaccccccatggacagaaatgacctcgtcacagggccccttcacggcctttgtcctcacggcccctcctggctggctttgcccaggccagcaccctgggcctgaccttaaccctgacttatccctgagggctccacgcatttcaaatggagcggccccatccccatctcaggagtggcccaccaccttcccaggggagtgtccctgctgagccatgagccctgcggccagcctgccggctcagcccagcccagctctgccacagagcagccacgccagcagcacgtctgttttctcgtcggtgagacgagtggtggcttatccaagtcctcagagtacaggcttcagggccctgtggcttgcggcatgcagtgcgcccggaagtgcctatgtggacacagtgtgtgtgcatggacgcaagcgcgtgccgttttcatggcaggaaacagcagggctttgggggcgacttgttggtaaagggagtacgtgtatttggtaagtagttcaaatagaacctgagggctggaactccctggctgaggccgaccttggtgattccttctataccgttggaggcatcctgcgaacgttggcgcctttgggagcagaaagtgctggtccagcttgcagagggctccatcgaacccgtgtgggagctgctcccgcggtttgaatggctgcgggctccgccatggataggccctgcccggggccaggccttccaagcccagaaatagaaacgtggccacagctcccacctcagtcccgaaactggagcccaagccctctgtccctggccgcaccagagccggcctccctgtgtgctgccagccacgcagcagcttggagaggacccgtccttaaacacttcccgactgccgggtccagagctgcgccctccctcccttactcatcgcgtttgagttcgcagttggtgtcctggttttccacctgagtgggcgctgggatggaagggtcccgcccaggcgtctggtgcggtcaggcgcacataagcagcctttgcaggaagccgtggctgggcctcgatccgagttctagcgccccaccgtaagggagagccaggtgcttcctgtccctcccggccacctcaagtgtaaaatcacggggttcagggcggtggtcttgggggctgcgctgcacagccgtttgcagctacagcagctgctcggagctgtctccgactttgcacccccgtttcacagagggagaaaccgaggcccagggagggcggggcttgcagcggacgggtgggggaagggctcctcctttcaggtcccaactctccacagtggcaatgaggtcgctcttttttcctttttttgagaccttgtctcgctctgtcacctacgctgaagtgcagtggtgcaatctcggctcactgcagcctccacctcccgggctcagttgatcctcccacctcagcctccccagtagctggggccacaggcgcgtgccgccacctccggctaatttttttatttcgtagagacgggcgggggtggggggtcttcctatgttggccaggctggtctcgaactcctgggctcaagtgatccgcccacctcggcctcccaaagtgctgtttcaggcgccggccaccgcgcccggctgtcgccctttctgactcagtttccccttctgggagcggggtggcaggtgtccgtaacttcttgttgtgaggaccagaggagcagcgcccacacagcgctcagtgaggccggcgctgcgcgcctttccccgggtggccgtgatcggaggcagcgcgttcggaccccgggccggcggcgggcgcgggtggatcggcgcctcggggctggattagtcgggtctgcccgcgccccgcccccgccccgcccgcgctcccgcctcccgcgcgcccagctccgcgcccgccgcctcggggcccgcgccgcgcccgacgtccgcccgggagcccagagcgcaccgagcgccgcccagagcgcgcagagccggcgcggcggacatgcgcgtccccggcccgagctccggctgagcagggcacgcggggagaggggtcgcctggacgggccagggccacccggggctcgcgctccacgcccgcgtccatgcagcccggctccggccccgggactaggggcgactgcctggggcgccggcgaggtgagtgcgcgctgcggactccagagagggaattgggactttggggggacaggggagggggagcgaccgcccccccagaagagcgggacgcccgagatctccgggccttctgcccacaccgcctctcccggagccaagcgcggagaccgcgtcctcccgggggcgcacgtggcggcgggcgggcgggggtgcggcgcggccgagggtcccaggcccgggtcagggcacccggggtccgggggtggaggcggggccgagcgttgtgggtggcgcgcgcctttgtctgcgcccaggtgcggaatcggccacccgggttcccggcgccgcgctcacctgccccgagttggagttctttgtctggggcggggcgcggctggcccaggctgcgccgcgtgtctggccgaggctgctccgcgggtcgggtcctcgcagacaaagcgcgccctgacctccgcccgccgccgggattgtgcacctcgcgggggctgaggcttgcccgggcgcccccgctgcctcttcgcagggaccctgagcctgcggacccggagtcctcccacctgtaccctgggcttgagtgatcctctaccccacgcgggctaggaggcagaggcggctgctcgtgcctgggtcacgtccctgcagaccatggccgagaagttaagcgggtctggtggcccctggggctgccaccccatttgggtcatctggccactgccagaagccctgtcctagaagggaaagagctgagggaccgcgtggaggaacgagccccagaaggtgcagctgctgtgtgtggtctaggaaggggttggagcctgggccaggcccccagagggccggcccctgttctgctctcagccctcccggatgggcgtggctgcacctggccaggtgttcaggttctcactgtgaggtggaggccacctgcctccggggcctctgctagggccgaggacccctggagcacccattctcagcctccctgagcaaactcgtctgctaagtgtagggcccactgtggcgtgaccagaatgggtgctggatggccccagccgcgcggcccgtgcggaagaccctccccttccttgcagccctcttggcttcgctggtgtctggggcgcccccttgtggccctggggagcttgtgttcgaacctgggacgtggagcggaacccactagagtgtttgggtcccagtgaaggggagggcagcagagccccagaagggctccaacctgtggttaccctagagacgagggccggctttgggggctgtgctttggggtctgccttttgggttggccgtcaaactgcgggctaagctggcttctcctccctctgcccacctgggaggcctcagcacccgcctccttcctggcccctggagagtcctggcggcgtggtggggcctgctgccccaaccacagagggggcagttaacaggtgggccacctggcgaagaggccactcaaacccgggacgccagccaagaagagggcccgcgtgcgtgccagagacagtgcagcccctcagatgaggggtccagaagtcctcccaggaggatggtgcaggcccaggagagaccccaggggtctgtggcaggcctgggtgttcagtgcctggttcatggctggcatggagcagcactggatccccatccttgctgtgtgaggggcccagatttgggagcctggcccaagggagcacttggtgctggcactgctgggggatgggcacggccaaggaggtgccgaggcctttctggggagccgcagtgccccctggaggcccaaaggctggtctggactcctccctgcccacctgcacaggccccttcactattcctcctgtttctctcggagtccttcctgtttccgatgctgggatggtcactgcgtagcctgggtcaccggcagtggctggacggggcagggaggtggaggcggaccccatgggagccacacttctgggggatgatgttgaggcgagcagagaggagaaagccacatgccccaacctccaggccccctggcttcccaggggtgagaggttcctgtccttctttctttgtaacaagccaggattctaggggtggtggccgcaaggctgggggagggagagggtcatcggggccctggactggggctgggagggtccctttctggggtgccggggtctcctagcttccatccgacccggcccctgtgtggttgagctgggtctgagcagaaacaacctcctcagaaggatgtcctacgtcactgcctgggggttggtggctgggggcgctggacatagagttggtgtttcaccctgcagaagcctgggctgcaggaccccgaccccggggaccgcacagggtgagcagaccaagtagcgtcagtgccaggagctcagcatcccttcccaccagctgcaccgcagccctttaacacacgaacgtgcggggcccaaccgctgctcctttccgaggggcccaccttcctccagtgcaggggcccttccggcgcgtgtgggtgtggcaggcccgcctcggctcttgccatcttacaggcatggacctgctgctcttctctgtggttcaggcccttgcgacgtgactaggaagggcttcccattccagcaagaaggtggaatccacacctggtcttctctgatacgttgatggtttttcacttctatgtttgcgatctgtctggaattattttcagataagaggtgaaacaggagcttgctctgaaggacctacgccacacctggcccccacagcctgcaccccacacctggcccccacagcctgcaccccacgcctggcccccacagcctgcaccccacgcctggcccccacagcctgcaccccacgcctggcccccacagcctgcaccccacgcctggcccccacagcctgcaccccacgcctggcccccacagcctgcaccccacgcctggcccccacagcctgcaccccacgcctggcccccacagcctgcaccccacgcctggcccccacagcctgcaccccacgcctggcccccacagcctgcatcccatgtctggcccccacgtctggccccccagcccgtaccccatgcctggcccccacagcctgcacctcacatctggccccccagcccgtaccccacgcctggcccccacagcctgcaccccacatctggtccccacagcctgcaccccacacctggcccccacagcctgcaccatgtctggggtttctcattcggttctgtggatctctgtccgtcgcggcatctgtgggaactctggggcttctcattgcgctcttggatctccttccgtctgtccgtttgcctgtccgtctgtcccagcatcgtgtcacatctttttgttggtttccaatgctgtcatttactggcagtaaaattcacctatttatttttgcagtaaatgcagctattttaagtgtgtggtttgctttttgacacatacctacgactgtatacccacccccgtcgcccctgaacccccgagctcctgtgcaccccctgcacccctccggctgacacatacctacgactgtacactcacccccgtcgcccctgaacccccgagcttgtgtgcaccccctgcacccctccggctgacacatacctacgactgtacactcactcccgtcgcccctgaacccccgagcacctgtgcaccccctgcacccctccagctgacacatacctacgtctgtacacccacccccgtcgccccgaacccctgagctcctgtgcaccccctgcacccctcggctgctgtggctggggccgcgctcacggtcacacggctgcgtgctctttgtggtctggctttggctcctgtgatgtttctgaggctcacagagcgcgtgccgacagcaattccatatgtggctgaggcagacgcgctcactgttgatccgtctgccagttgctggacacgggtgtccctctgggcagctgggcctggcttcaccccagccccacaccaggccccggtggaccctgagccgcctcccttctgccctgaacagcagcccagctcccttggctgggccacgtgggattcaggggaagcagctcccacagtgaggacctagtaatccacgtgttccagatccctgcttgggattttggttggggtgataggaaacgtgtgctgtggcatggggacagcaggtctcttcccagcaccagtgcccctctgggctggctacgcctggtgagcctcctggctctgggagggcccctgccctcgccctccaaggtttttttttttgagacggagtctcgctctgtcgcccaggctggagtccagtggtacgatctcagctcactgcaagctccgcctcccgggttcacgccattctcctgcctcagcctcccgagtagctgggactacaggcgcccgccaccacgcccggctaattttttgtatttttagtagagacggggtttcaccgtgttagccaggatggtctcgatctcctgacctcgtgatccgccctcctcggcctcccgagtagctgggactacaggcgcccgccaccacgcccggctaattttttgtatttttagtagagacggggtttcaccgtgttggccaggatggtctcgatctgctgacctcgtgatccgccggcctcggcctcccgcagtgctgggatttcaggcgtgagccgcggccggccgccctcctaggttttagtaggttggagagctgtgggtctcgcacgcttcaccagccaaattcctaagtccctttttatcgttttaaccctaagagtcacaggtcgtgttacagatcagggggacagacaagcacagaacccccatctcccagcacccagcctccgagtcagatgccccccgccctggtctctcacagctgtgctcactaggcaagcctggccggcccctccctggtagcagtgaagctgttgattatgtttgtcgttgttgcatttcagttacacaagtgttaccagaatgcagtctcctttatacaaacttaaaagtatgagtttaagcctagtctcttgtgccctccacccccgccattcccagaggggactgctctctcctggtggacacattctacaatttcaccaacatagacgccgacacgcgggcacctacgtaaacacacatgtgatgctcatgtaaacaaacatccatgcacacactgccacccaggtacacacacccgagaatgtgtgtgtccctgtacgtgaacccgagtgtgcccacgtacacgtacccaactgtcctcatgtacacgtacccgagtgtgctcatgtacacgtacccgagtgtgcccatgttcatgtatccgtgtgtgtacgtacccgagtgtgtgtatgtgcctgtgtgtacgtacttgagtttgtgcccatgtacgtgtacccgagtgtgtgtacgtgcctgagtgtgtgtacgtgcccaagcacaggcacattgtccagatccacataacactccttctttgcagttgcttcctccacacacagagtgtcccccatctctccagggtacacactgcagtgtgggtgaacgtcaaaagccgtgcagtgagagaagccaatcacagtaggtccgtgccgcctgacagtgttcacatggaagttcggaaaagacggctctgtagagacagacagatttgtggtttcccagggttgggggtgacggttaggagtcagggtttctttttggggtgatgataatgttctgtaatggatcgtggtgacaggtgcatcactgtgaacatactaaacgctagtgaattgtaagcgttagacggtgagttggatggtatgtgatttacatctcaagtcttagtccgtgcgggctgctctggcccagttctgcagcagacattcacagctcacagtgctggaggccgcaagcaggtcaaggcatggcagagtccctgtgagggcttcctggtccatagagggtgcctctccgctgcgtcctcacatggtggaaggggctaggtggctctggggccctttataaggcactgatgccgctcgtgaggctccacactcaagacctcatgacctcatcaccttccacctcctgatcccatcacctgggggtgaggatttaaacatgtgaattcttgatagacagaaacgttgaatccacaactcaatgaagctgtttaatcaaaaaaaaaaaaaaaagaagaagaagaaactaggagggaaatatctatttaaggtcattcttatgaagctcattcctggaaactgccgtgaagtcccccagagcatggggccctccgtccacccctccccatcagcggccacattctcgccacctgcttgtggcaggtggttgagcgagtttctctggaagagatggaggagtggggctgagcaatttctgcgattgaccctctgagagctcccccacatagcctgggacactcagctgcctctcagcaacactgggcaccaggcctagagcttggccggcctgggagcatagcgcagcattctgtggctgctgggagcttggccggccgcaggcacatagcgcggtgtcctgtgggctctgggcaccaggcctagagcttggccagtccccagcacataatgcagtgtcctgtgggtgctgggagctcggccgaccccaggcacatagcgcggtgtcctgtgggcgctgggcaccaggcctggagctcagccggcccgggagcatagcgaggtgccctgcagccttgcggacccacatgtccagcctggtcggtatcctggttctctcactttcgccagggcgcctgtgctgggcagtggttgggagcaggaggtgtgtcccggggctctccatcatccgcctctggcctgatgggtgggggcccagcagggcccacagctactggtgctggttctcctgggaggggtgcagatttgccaaatgccggcgctcccccagtccacgccagcagcagccttggttcccgatccccccacaaaccccgtcttcactcagaccccctctaggaagcctgctgctctgagcagagaggggcctgtgtgcccccagcgtgagcacatgtatacacatgcgtggagctcaggactaagcgtgttcacctcgtacacgggggcatccacaagggcacatcccgcctggccctgctggaaaaccacccagacttgtgtgtgggcattgggcgcaaggtccacgaggatgaggaccaccctgactgcccctgaccccccttctctctctccaggcatccgtgggctctgagaagctctttgcgccgggaaccgataaaggtaagtgggtcccctcggcccagctcctgggcctctgaagagacacaatgcgccctgcgtcttggcggcaggacatccccctgaagtcaggggagagatggtcttggcacctggggtgcagagctgggtgggaccagggtgctgggattgctgggaagcccccaggagcaggggagagtagacgaagccactgagccctaggcagggcctgggctccgctcgtagcagcggctcccagagtggaaccgttaggaatgtgtgctctcaggccctccccaggttcgtggggtcagatgctcggtactgaagggccacctgccacgagcaccacaatcacctgtggctgctgagttaaagagaaacgggactgagactcacttccctggctctgctgcctgcgcgcctctgtggtgcagtggaggggcctggattgctgttccaggccaggccttcgaaacctgtggctgtgagctatgggacagggtgtctacaggccagcaaccctctccagagggggtagccccggcgtcttaggggccttcgtaacctgtggctgtgagctgtggggcggggtgtccacgggccagcaaccctctccagaggggatagccccagcgtcttcttagggcctccctggcgctgggatcctgggattcccacaccaaggcctaggcgggcagcatctccggcagggccacggggtctcggctcctgcctccctgggtttccagctggaaccacccttttgctgggacggcttcatccggatgtgattggacaggacaggccctgccaatgccggcaaggatgggccctactgcccttcagcaggcatggccttcacctgccttcaagttggaagcctgttcacatcagagcatcacagcaaagcaggcgcagatggggtggtgtcagaaggggcgtgcatgggacgggccccggtaggagaggcagctggcttcgcagacggtgtcacgcggggctgctgaatactcagctcactgccgcggctgctgccgcatctggacggacaatgtcccagtgagggctggaggtgctagaagggcacaggaggccccgcacgtggggtctagtccaggtctgtgcggcccaagcctctttccatcctgatcacagctcttactatatgcaaggctggcttggagatgtgggagagaggaggagaggtcccgtggggctgacccagggagctgggaaagccggtggagatagtgcccgtgggctccctctctcctgtgtcctccgcgcagcctctctgtggtcgctgggtggtggctgctgtggaaggcctggccccaggtgaagagtgaagatggggctgcttcctgctgcctgttttcacctgggaggaactccttgaggccccagaagaccaggccccatggtcacatggggcagggacggccgcagctgtccccatgggccatggctcactgtcccaaggcctcaggaaggaagcagggtctgccggggacgtgaacaggaggcatgcggcacgtggaacgttgttttgtttctcctgcgaaactggccccctgaccgtggcagctcctgaccccaggcaacaggagctccaccacatggacgctgccctctcctgactcctggggacttgatctgagacctgcccgaaggggcctgaaaaggagggtttggggtgtgcgggggtggggggggcaggccccaggggctcagaggggcccacaggacctgcgggggacgtgcctaggtgggcagaagggtggccagggagcagggctgagggtggcgggtgacgggcagtcacagtagggggaagcctcccacccagtccctgcccaagtttccaggaagtggtcaagccttccaccagggggttccagaaagaaaaggtggttacagctgtgggcgctgctgttggggtggggcagacccatgccctgggctgagggcacatccaggggccgtgaacatgaggcctaggtacacaggccctagctcccgtgttcaaatccagctcccctcttgggccaagtccttgatgtatcttggttttgtctgttaaatgaggtcatagcagcccctgtccagggactgactcttgcagggcctgtcctgtccctgccagtgatgcgtcttcgggcaggtgggctacccacccccacccctggccacggcccaggctcccaagccagctccctccgccgggcggggcctggagcctcgggtgagatccagctagctgtgtggcctccgtgcctgcctcctcatctgaaatgggggcatagccggagcccagacatagcctgggcaccgggcacgtaccagggctccctgggccacaggaggggcagggacgaggccctgctggtctgaacgcagccaccctctctctgcaggcccagcgcttgagaagtcggaggccaaggccgggccggtgcccaaggtgtcaggcctggagcgcagccgcgagctcagcgccgagagcttcctgcccactgccagccccgcgccccatgccgcgccctgcccggggcccccgcccggctcccgcgccaatcccttggtgaagaaggaaccccccgccccgcaccgccacaccccgcagccgccacccccgcagccccgcggcctgctcccgacacacgtgcctgcatccctgggcgccttcgcgggccacagccaggcggcagccaacggcctgcacggcctcaggtggggtccccgcgggggacggggcctgtgtggtctcaggatgggggctctgcaggggtcgggctggcaggcactgagccccgtgtcccgcagcaggagcagcagcgcccccctgggcctggggaagcacgtgtcgctgtcgccacacgggccgggcccccacctgtctacctcacacctggcgctccggtcccaggcgcagcaccagctccacgcggccatgtttgccgcacccccgacactgcccccgcccccggcgctgccggccagcagcctggtcctcccaggacacccggccggtaggtgtctcggccacaatctcgcccagggcaggggttggggggtgcggggacacggccaccggggaggggcgcacagcctggccctccacctgctgtggtctctgcggaccctgcgcgcctctctgagtggttcccccaggtgtgcctttccccaggagtctctgctgggccacaggccatctgtgtgcggggacaggcaggacacgtgcccatgcacgtacagacgcgtgttcacactgagacgggcgcacgggcctcccctcctggggccaggcctcccccgcagcctgctgggtcctgagccctgggaggagggggccgcacatcaagcaggcgccatcccagtggaaccccgaccgcgaaggcttcctccctcggcccccaggcgcttcctgaggctccgagtcagcccggcccaggctggggacggccccgtgtcccgggatgggaccaggatgctggcctgcgggtggctggaccctggctcccggggaggggctcaccgtgttctctcttgcctctagatgccagcctggcggtctcattcagccagccaatcatgtattgccagcctcattcgggaattctgattggtacttggtcacaggctcctctcttacctgcacccctgggcccgcacgtggcgagcggccaccccggcttggcctgccgaccccgggagtgccaggtgactatccgcctcgccccgccgggagcccgcggccaacgtgcctctctgtctctctctctttttctcttgtagatcacgagctgctcaggcaagagctgaacacgcggtttctggtgcagagcgccgagcggcctggcgcctccctgggcccgggggctctgctgcgggcggagttccatcagcaccagcacacacaccagcacacgcaccaacacacacaccagcaccaacacacattcgcccccttccccgcagggctgcccccgacgccgcccgccgcacccccgccggtgcgtaggcccgcgtgctggcagggggcgggggcgggcgtggggcggggacacgcagcaggcacacacagacacacgctcgcacacacaccagcccaggaggaggtggggggccggcggcacctctctgtcgtctgtccggtccccaacgtgccttctggtgtccccaccccaagctgtgccatgaggcccccaccctcggcagtggtcctggacttaggcaggcaccccgtgcccacgtgcatgggacaccctcacgcctgcactagatccccagtgccagggctggaggcccagacaggcctgagggcacagggaccatgactcagggtgcctcccgtgttccccgccccggaggcccggtctgaggagggagttgctgggggctggagtcccctccactctctcgagttttattcggaaactggccagtttgtcagtaacccggtgtgtccccagcgcgacccagcagccagggcttcacgccccaggcctcagccaggcacacagactgcctgggggggccgagttcccaccccatgcaaggggacccttagaatggcagggccgccctggtctgagactgagttcagagccgtggggctggcgctctagaggagcctgggacggctggccgaagccgccagcctcaggaagcacaacgccgtcctgtcactgcccagcccggccaggtgggcggggcccggggcccagcaacggtgtcgtgtgtgcggggcctcaccctcctctccttcccttccagtttgacaagtatgcgcccaagctggacagcccctacttccgacattccagcgtgagtgtgagtgtccccgaggggcccggcgcgtgtcgctgtgcacgcaggtcctggccacggggcggtgggtggggctgcccctcgcctggcctcgcccctgctgcattggtgccaccttctggttacaggcagagggtggggtgaggacttgggccccccctccatccgctctccttctcttacagttcttcccgtccttccctcctgccatcccgggactgcccaccctgctcccacaccccggccccttcgggtccctgcagggcgcttttcagcctaaggtaccgctgcccctggcaggtggggcgggcacagcgggtgggtggattttggggggagtgcatgacaacctcgccaaactctctgcccacaaccacccccctttccctcccttgtacctgtcgtcatctgggtgctggcgtgagcagcccctgccaggatggggggccctgcggtctgtgtgtggccaccgtgggagggacagggggtccagcctgggagcagccctgggaggtggtgggaccgtgtggagagcacactgtggaagcctcgaaggagaacattccagtccttggcaggaggccctggtgtggacagcagcctcacaggccgtccttaccgcaaggaggttcttacggggccatccacactgcgaggaggttcttacggggccgtccacaccgtgggggacccgggccttacggggccgtccacacccgcaggggacctgggtagcaggaggttgtgtgccatctcagccaggggagagggaaccccgtgaccctcctcactgttcctggccttgtgctgtaaccccaccctctgcggaggggcacacagctctcagtcctgaagccgcctcacctgtgggcctcaggttctgaagacggggcctggaccatccccggtagctgccaagcccttgacctcccaggatcctgcagcgcccactcattgcccacagctgccctgaagggcccagcacgcacccctgggctcccctggggcaccgcccacatcgtggacgggcagatagtgcttccgaggaccaggcacccctgggcactagagggtcttggacccccagaccccgtggttgaggaattcagaggaatggagaagggatgtatgtggcccacctgcaggtgtcgagcagggacccccagactgggactcgggggtactgccctgagcccagacagccaggacgctgaggccctgagtctgggagggaaggaatctgtcccggccgcaccccgagcacagctgcttctgggcagggtggtagcccagagggaaggggcggtagagccagtctggggaggagggggctgtggtgtgatggccggtctttgctgtgggacccccctttccctggcgcccctggtgggaaacgaccatctccccttggcccatccaggctcacagcagctcctcctgggctggagactaggtgtgcaccactccccctctgggtggggctgtctcggccctggtggcaagtggctccccggggagggtcgcccaccttccctggcaagagcacctgcttcccacctttgcagaaactggcgggccaaaagtgtggtggtcctgcgagggagggcaggctgtccctgggagacagcgtgcggggccccacggcaaggcaaagcagggcacaggcccacgccagaaccaggaagcccgaggcgtcctcctgcctgggcggccccaggcgcacacaagctgtctctttctcccctcagacttcaagccccattgaggtggcccgccgggctggtgcggttcacacactcctgcagaaagcgcctggggtaggtgttagtgggcgcccgtccccaccccgggggatggcctgccccggccgggccctgtgcgggctggtggccacagcagacgggctgtgtcccctgcacccccaggactcagcctcctgaggggcccggacctcacactcctttcctgtctccacaggtgtctgacccgtaccgggcggtggtcaaggtgagcacgtgttgggaaggcccgtggcaagggaggactctggtgcccccggggcggcctcggggggcccgtgacagcaggagtctgcagaaaacatgggtgggggtggcaccagccccactgagcgcttccatcctgtcgcagaagccggggaggtggtgtgccgtgcacgtgcagatcgcctggcagatctaccgtcaccagcagaagataaaggtgagaccacctgggctggggcagggcgcttgtgaacccgactccagcctggtcgggccctgaaggccaggcatgaggctgtgtgtgttcacacgcgtgtgcacgggtgtgatcctcacgcgtgagccgcctgccccttcctctgggtactgggcttttaccgtaagcaggtcagcgaggccacagggcagtgctgggtgcccgggtgccgcaaggccctctcctcggcaaggtgtgccggctgggccacggggagcagagcaggggcacggggtgccgcaccagctccccacgtcactggggtgcctctggggtcctctgccgcccccactccccacagtgattgagtgtctgctgtgttcttcggtcttcagcagtgacccagggggaccgtgagtgctcacaactgatgtgcacctgggaaggctgaggaaggcgggagccccgcgggcagctcggtgcaggtcccaccaggctaggagctgcgggagcgggagagggtcctgggaggccaggacagggggactgttgcctcagccccgtgggaccctgcacctctgctgtccctgcgctgtcctgatgacgcacgtcacctccgcacacaactctgaaaaatcattgtcctaaatgccctttgggacgggactcagagcagaatgctgtatgtctttctttttttttgagacggagtctcgctctgtcgcccaggctggagtgcagtggcgcgatctcggctcactgcaagctccgcctcccgggttcacgccattctcctacctcggcctcccgagtagctgggactacaggcgaccgtcaccacacccggctaattttttgtattttttgtagagacggggtttcaccatgttggccaggatggtctcaatctcttggcctcatgatccacccacctcggcctcccaaagtgctgggattacaggcgtgagccactgtgcccggccagaatgctgcatgtctttatacttgcatgtctgggtggaacttctggacacacagcagagggatcaggtgctcctggtggggggccgtccacggcagagtcgggagacctcatcactcctggttttgtccttggaactcggggcatggttgctccacagaggagggcagatcctgcaagaggccggcggtccagggagagggcgcacacagggtctgcccagccctcacgcctgcccccacgtagtgccagagtaccccagcatcatcatggccagtgaaaccaccccagtgccagagcacactgcagggaccaggaggggccggcccaggccagcctgagtgcgggtcagaggcaggacaggcagaggcagcgcagtcaccaggacagtggggtcttgtttggctacacccctcctggctctgggcccctctgctcccatgggagggcatgggcatccccagtctccacccaagcctggccctgcctcccacagccgcctggcagcgtgggcacctgaagtgtggccagtgcaggtgaggggcacatgttgtagtttcatataatttttaacacatttaactttgaaaactgataccaaattcagtcactgagaaacttttcagcatatttggaacaacttgggcacgtgagcatgctttttcagtttctttttttttttcttgagatagagtctcgctctgtcacccaggctagagtgcagtggcatgatctcggctcactgtaacctccacctcccggcttcaagtgattctcctgtctcagcctcctgagcagctgggattacaggcgcccgccactgcgcccagctaatttttgtatttttagtaaagacggggtttcgccatgttggccaggctggtctcgaactcctgacctcaggtgatccgcccgtatcagcctcccaaagtgctgggattacaggcgtgagccaccgtgcctggccttaacttttaaaagaatctaaatacaaaaaaagtaagttattttccatgacagcgtagcatcccagctgccatgtgccaagtacgtaccacagttcagaggacgtgagctctcccgttcagcttttttgctgatcatgtgtaacatttccgtcatcctgagtagagaatacacccttgaaatccatcccacctgctccccttactggactggctcacacccagtccctgtggcccctcaggcctgggctccctgtgttcagggccagtccccgggcaggcggccctcacccgttctatcctcccaggagatgcagctggacccccacaagctggaggtgggtgcaaagctggacctgttcggcagaccccctgccccgggcgtgtttgcaggcttccactacccacaggacctggcccggcccctcttccccagcacaggtgagactggagtcgggccaggtggggggcacagaaacctcccgctcgtgcccagctgagcctgccttcctgtgccaggagtgagagcgctctctggaccgcagcaccagcctttgcttcttgatgctcaccacttattcaggtcaaagcctggcaactccctcacctcaccccacccctcacctctcttctcctcacctctcctctcctgtcctccccaccagcctccccagggtggacctgggcctggggctgctgctcctccccaccaagtcctgcccagtgtgtcctggggggccttcagcccacgccacacggctctgaggcggctggtcctggccacccctcctccctggggctccctgttctggccccaccagaggcaaaggaatggcagggacccaggcccacgcgaggctgcccctttctgtctcccagcccccgctttcccaggaggagtttggcctctcgctgaacagtaggaagctgctcctgaggccaggctgggcccacaccccagtgccccttcctcacatgcatggttgctcccggggtcccaggacgggcccagctgcggtggtttcctaggaagggttccaggacttggcctgtactgtcctcagtagcacggcccagggtgggatctgccgggagcagcgagggcctccctgccctcagtcacccactcccccgagtcaccccctcccccgggtcacccctcccccagcaacacaacgtgaccacacccgagtgtcatcctccaggcacgcagaggcacgaagactctggggtgctgatctgtaggcaccactgcctggcacaggcccccaggaggaaagtgggctcgaagttcaacccacagtgtgggatggacacagtctgggtgcctagaggctggctgagggccagctgtgtgcacagacctttccaaagatggtgtctcagcctgcacggtgcacgcctttctacacatacacagttacacacagttacacatccacatccacgcgtgtacgcacacgtgaagcatgagcatccacatacagctgacccttgaaccacacagaggctgggacactccccaccacacagttgaaaatccaggtataacttttgactcccccgaaacttagcctactgttgacaggaatccttacgatagcataaacagttgctgaacacctgttttgtgtgttacatgtatgatggactgtattcttacaatgaagtccactagagaaaagaaaaccttatgaggcagaccatgaccaggcgtggtggcgcacgcccgtggtcccagctcctcaggaggctgaggcaggagggtcgcttgagcccaggaggtcaaggttgcagtgagccgtgattgcaccactgctctccagcctgggcaacagagcaagaccctgtctcacacacacacacacacacacacaaaatcatagagaaaagatatttgccattcgctgtgtggaagtgaatcatcctaaaggtcttcatcctcgtcctcacacggagtgggctgaggaggaggaggggccggtctcgctgtctcaggtggcagggatgggaggaaatctgtgtctaagtggcccgcacagttcaaacccatgttgttcaagggtcagctgcatgcacacgtacatacccacgtgtacaggcacacgtacacacaggcacaggcacacacatgggcactgcgttgcccagttgtcctgctgatggaacctttcccagccaccaggtccttgaggcctgtcccttcctcagagctcccaacccccgctgcagccccccctcactctcccctcaccgtgtttggtctcttccatgttcatgagcatttgatggcacgttgcatgtggacgtgtgaaggcagagccctgtccacataagggtgatgggcgtgcccagcagccacatgaggctggcttcacaagcatggtggcctctgggccatggagcatcccagtagtctggctttctcagaaagcagaagtccaggctgcagtttctggctgtccgcatcctggctcaagccccccggacacgtgctcagtgtggcgcccagttctgggccctccacactgcccgccccaccgaccctgctcctcccccgcctccccttccctcctctggatacctggtggctgtccctcggtgctctgccatttgtcctgcgaggctgggccccctcagtcccggggccagtgctgcctcctccatctccttggcaggtcttgatatcttgctggcagggggcaggatgattccttgttgctcttttctctcttccatataaactttcaatctgcctgttaggttccagctttcactggagttgggttaaaggggtacatcgacctaagagggattcgtacgtcatctccggtatcattttcctatccctgatcatggtgtatctcatttatttaggtattagtagaattactcatagatgctttatattttactaatattatgattggaatttgtaagttacattcttaagctgttgctagaaaacagaagtgcgtatctgttttgaagatttgtatgccatctcttgatgctgtaactagcaatcctgctaaattcttacgaatgcaaagacatttgtctgtcaattcctttaccttttctgtgtagaaagtcatatctaggagtgggtggtttgcccccttgtgtaaactgtcggtacgtttctggagccactgttccagcgctttgttccagatgagtttcctgagtaagcctggcctttactttcctgtgctgcacctggcaggttttgtcacgagggctctttgccgtcttcagtgagttaaggcgctttccttttttctgctctctggaagagctcttgtgaggtctgatcctcactgccttcaaggcttggaggctcacagttcaggttccaagtactgattttttttctccactgggtgtggtattcctcaagctgtttcttctggcatcggtttcagtaacgcgagtgtttccagtaagttgatttggggcaggctccgtagctgtcggtgtccatccgtcacgcctgaactccgcaggccctggcaattcttaatgttgcttggctgtgtcgtcttttttccttcattaatctcaccagaagtttgtccatttcaccagtattttattttaatttatttattttgagacgaagtcttgctgtgtcgccaggctggagtgcagtggtgcgatcttggctcactgcgacctccacctcccgggttcaagcgattctcctgcctcagcctcccaagtggctgggactacaggcaggcgccactacacctggctaatttttgtatttttagtagagacatggtttcaccatgttggccaggctggtctcaaactcctgacctcagatgatcctcctgcctcggcctcccaaagtgctgggattacaggcgtgagccactgcgcccggccaatttcaccagtatttttaaaggagcagctctgacctcgctgccttctctgtgtgtttccctgtgtgtcgctcacttttctggccctgtctagcttgatctggtggttgagaatattaattcctcagcctctcccagtgcgggcatttgaggcagtgtactctccatctcctcctgcacacgctttgacaagctgtgttttcgtagcatggggcaggctgtcttcctctctagtttagaagagtggcatcagctttcatgccacagctcagtggagaccagaagctctgaatacaacttgccgcgtcctacatgggaggcatgagcaccccatctttgaggtccctaagattagggctgggagggagtcggagtaacctaaagatgacgccctgctggtctttaccagaaacctgctctctggacccatgtggaggacggcccctgaccaacagcactgaatcccctgcagcagcccctcccagggcccgggcccaggccccacacggttgctctccaagggttgttggggggccagggctgatgttgacgtggtgctgtgggctgggcctgtgcccaggaatgccacaaggggctgccatgtgcagcctccaagacagaaccgtgtccatccaggcctgaggcccagcaccacattaagaagtgaggaccatctatcagctcccaggtgaaagctctgagataaaggcttcaggagtggtccgatcaaggtgcatgttacttggactttgtctctgcccaagttgcagcccctttgctccgagggttgcatcgcactcagcacctccctccctgccccccttggggtcccaggatggctgccactgcggctccaagtcaaacctcctccgaattgtggggtagattccacctcttactctgactggacacgcttcacccctcagggcatgcgagagaatgggaggtgaaggttcacagaggaaattggggtgctccctgtgaacagagctgcagatgggaggccctggtgctctctcctggcttctgtcaaacctggctgccccccccaggtgccgcccatcctgcctccaacccatttggaccctcagcccatcctggcagcttcctgcccactggccccctgacaggtgggtgtctctgaattcagcccacgcagcctggctggttcctcagcagccttgtggcgggggaattaggtgggcgggaaggtggccccgagccccagggagccccttgggtcatgcaggcagtacccaccaggcccaaagcctctacagcagcccccactgggccaggtgggagccgcagcccacgcctcacagacctctgggtcccgcggttgcccccacagaccctttcagcagaccgagcacctttgggggcctgggcagcctgagcagccacgcctttgggggcctgggcagccatgcactgggtgagtgacccagcctgtgcccccctcccccgatgcccgcgcccctcccccatgcctgtgtcctctgcaggaaccccgatgcctggctgacctccctcctctctgggctgggcctccttggggcacccccttctcagtgtcagcctgggacccttctaaaacccctaccgggttctcctggggagtggctggggagcagacagacccaacctcatgctccccggcctctgcccccagctcccggtggcagcatctttgcccccaaggagggctcctccgtgcacggcctgcccagcccccatgaggcctggaaccgactgcaccgggcaccgccctccttcccggctccgcccccgtggcccaagtccgtggacgcggagcgggtgtcagccctgaccaaccatgaccgagagccggacaatggcaaggaggagcaggaacggtgagtggccctcttgttccgtatccccaccacacacccctaccccgttctttcccccctcccgtcatccccggttccccctcccccgttccctcttctccccgtttcctctccctcaccgttccccctccccctgttccccttccccgttccccctcccccattccctctcaccctcctcgccccactgctgcgcactcacagtctgtccagctctgctgagccccggggtacgggggccaaagctctgctccccggcgactcctccctgcggtggggagtgaagcctgggccctggggctaggaaggatgaggagggtgaagaccccaccacaggcacccacacctgccatccgggagacctccaggtggccgcgccctgacccacggagtttgagggaggagttcgggggtgcggctgccgggaggcccccctgtcctaacagggaggggcccgtggggagccgaagtcgctgcaggcggctcatcccgcttccgtctcccggccaaggtttccaggccgcccagcggggagaggacgcgtaggttttgggagcctgtgggggtgcgggagctgtgggtgctgaggggtcaccggccacccagaaactggaggccccgacaagcaacgggaacatcccggggctgcgccgcgcggcaggacggaggtctcgggagtgacgggtccgccctgccgcccccagggacctcctggagaagacgcgcctgctgagccgggcctcgcccgccacccccgctggccaccccgtcagcggcctcctgctccgggcccagagcgagctgggccggtccggggcccccgcggagcgcgaggccgaacctcgggtcaaggagagccgctccccggccaaggaggaggccgccaagatgcccgcgcgcgcatccccgccccacagcaaggcggcccctggagacgtgaaggtcaaggaggagcgcggggaggacgaggcctccgagcccccggcgggcggcctgcaccccgcgcccctgcagctcggcctgggccgcgagcgcctgggcgcgccgggcttcgcgtgggagcctttccgcggcctggagctgccacgtcgcgccttccccgctgccgcccccgccccgggctccgccgccctcttggagcccccggagcgcccctaccgcgaccgcgagccccacggctacagccccgagcgcctgcgcggggagctggagcgcgcgcgggccccgcacctgccgcccgccgcccccgccttggacggcgcgctgctgccctcgctgggagccctgcacttcccgcgcctctcgcccgccgcgctgcacaatgggctcctggcgcggaccccgcccgccgccgccgccctcggcgcaccgccccccctggtgacggcggccgggccccccacgccccccgggccgccgcggagccggactactccgctggggggcctcgggccgggcgaggcgcgcgactactccccgtcccgaaatcccccggaggtggaggcgcggtagccccggggccgcagacgcctctccgagcggagcgcaccgctgtccgtctctccatcagttcctagaactcaagcacagctcccgccgatcctggggcggcgccgcctctccacccgcagcctgcggaggcggggacttgggtgtcggcttttctgagggtgatcttttgttttccgagtttgggattcggctgttgggaaaaaaaaatcgcgtttgtaccttttccccccacagatgagaagtgtttgtaatggatttgtatttttcttaattttatgctctttagacgtttaaaagaaccaaaaaagaaacttttgcttcttcgttttcggttgggatttgcagtttaatggcctcagatccttctccagatccccagggtttctttgtcttatttatggagaaaaaccggtcactttgtccagcgcactgtgaggcccccactcaggccagccctggcccccccttggtacttggaaccgaagttacagattatattaaaataataatgtacaaaactttgtttttttgccttattatgcagaagtgtaatttcttttttggtttgtttttttaaaagcaaacgaaacgtgtaaatagtctgttgatataaatatatgacgttactaaattcttaatctagatagactttataaaaaccgtttccagaaacccctctggttgtttgtctaacatggtcacaaaaacccaggcgctgctggctgtaaacattatcagaagtttaatggcagcaactttccttcaactatgcaagcgcttcccggcggctctgctggttgggggaggaaggttccgccagcgacctcccagcccctgggtccgtggaggggttgggtcccccagcagagcccctgggccagcagaacagcactcctgggcggctcctgtgggcttcaggactggccggctccagccgcaagggcgatgctgtggacgtttgtgtggatggtgcagtgttcttggaatctgtagaccagatcggtggaggtatagaagtgcaagagtctaaaggctgattttacacacacacacacacacacacacacacacacaaaatcactgctgtgtgttttcttccgcctgaggcatcagcgtcacctcggtgtggtcgtcgcctcccaggcccttggcctggcctcctctcagtttgggttttgccctcacccacatgagcccccccatgccctgccccccttgcggccttttgtgttccccgatgtctgggctgtgtccctgccgggattcccagccttcggggtcagccgtcgagccacttgctttgctcagttctgtgtttcagccacatttccacggtggaccctgtttgttttaaatattctgttcccatgtcaatcagtgacgataaatacagccttgatttggatgaaactgtggtcgcgtgttctgtggtgttggggggccaggctcacccaggctgacccctgcagccgtgcgtccctcctgcagcaccttgggatgctgggcgcctcggcggccccacgctgtccggtgccatcgccccggaagtgaagcacagcaggtcccagcttcccagccctgctgccaccccggctctgcccagccccctcccccagtgccacctctcccggtggaaaccccagctcctggctctgccggatgccccattgtgctccttcgttcttgggggtgtcacgcggcctcccgtcgtcccacccccagcgaccccgctggccgccttccctcacatccacggggttttctgcatagaaggtgctcttagttcccgcctttgtgccagagagttctggccccgcagggacttgtgggattggctttgccctggctgtgcccgaaggaacaggagctcagagggcaggagccaggtgcagaggtggcagcccccaccctccagtgcagtgagcgccaggcccacctgccttgagtgatggtcaggaaagctccaggtgcacacctggccttgacctgagtgtcacccccaccctgtccctgccaattcactcctcactaaggggccccagggctgcaacctaagaaggaggcctcgtgggcccaccgcgcgcccagcaaggagtgccctgcgtcccacaagacccttccaggctggcaggaggggcaggtcccaatccacgccccaccaggtcattgtctggggcctggaccatctgccatgtggggcttctatataagggtttgcttcctatggagtcagccccaccaccctgcaggcctgtgtgtcccaacttgggcttcagcctttacggtgagctgccacttagcgatggggagacactgggaaatgtgtcatgcgattttgccactgtgtgaatatcacagcgcgtggcacacacctggatggggcagcctattgctcctgggctgcaccccatgtgactcctgaatcccatcggcagctgtaacccggcgcatgaaaaggtacagtaagaatgcagcattctggccagacgtgatggctcacgcctataatcccagcactttgggaggctgaggtgggcagatcacctgagatcaggagtttgagactagcctgaccaacatggtgaaaccccatctctactaaaaatacaaaaaattagccgggcgtggtggcgctcgcctgtaatcccagctgaggcaagagaatcgctttaacccaggaggcagaggttgcggtgagctgagatggcaccactgtactccagcctgggagacagagggagactctgtctcaaaaaaaagacagaaagaaaagaatccagcattctaatcttctagggccgcccctgcctatgcagcctgccctttcccacagcgcggctggacggcacatggctatgcttcacgtccccttgtcttggttattccaacctatgcatctaatcttcagg
